United States Patent Application Publication US 2019/0085377 A1 - sequence listing, part 2

SEQ ID NO: 1 - DNA, 4876219 bp, Salmonella enterica subsp. enterica serovar Typhimurium str. 798 (residues 1,625,408-3,250,814 of 4,876,219)
atcgctctgctgctgcacccccagatcaaaacagtacatcgactgccagtgctcatggtggcggaattgtaaaatccatgtgcttccctcctgcatcaggcggtattcgccatgcggcgtttgctgggcaatttcagcctgcagacgaagcggtgcggttagcgtttggccgccaaaccccacgtccgcgatccactgctcatcctcaacatcaaccagcagcaaacggtgcgtgcgcggcggtaaactggcgggatgagacagaatgacccgccccaataagcttcggacgttaaaaccgatgtcgcgtaacgcgcgttcaaacaggccattcagttcaaaacagtatccaccgcgtcgggcataaagcagtttctcctctaatgccgtctcatcgagctgtatttcacgaggcagtagcacatccagattttcaaaaggaatcgcgcagttgtgcgctaagtgaagcgttctgagcgcttcaaccgtaggaacccccaacggctgacaatgtaatcgcgtaaaataagcatgtaaaaaagaggtcatctgaggcttccattaacattaatgcttgcgttcggcacacaggctgaggcggatatcgctgcgcaacaggataccctatccgtggaatagcgttggatacttttgaaaaaaataagacaggccggctgtcgcgccggaggtacgtggaattttggcgtacaaacggaaatcgggttctgagaatctctttgcgacacgccgccaaaatagcggcgtgttaaaatttttaacgccggctcagcgagtctgatttctaacaaaactggctaaacataaacgctttttaataattgtccaaatagttatggtagcgagcttttatgtcggccgcccattgcgctttcgcctcctgcatgttgctggcccgagcgatataatattctaaacacggaatggcgcctaatgcctgaggtaaggcattatatgctgccattcgctctctgacggttttatatttttcatcaatatcataatcatagtacgctggcgcttcaaaaaagccctcttccagtctcatacaaatctcttcaaaggtcccctcaacctcaacggtatgttccccatccgatatcctgacgattggcttaccttcagctatcagcgagagttgttcgaatgttaacatccgaccatcagaaagctcgacatctatagtaaacagtccatcacgtacagcatcagcaaggtgattatggatattccctgcattggcacagaactccgcaactttaggcgtaacattacaataatgttcaattactcgcgtaaatccgtaggccagtcctgcggtaagcacatacaagatgcctttcatgatttttgttgataatttattttcataatctcctgcagcaacatgaggtagcttatttcctgataaagctctggcataggtagaaactgatgtatatggcatatcctactccttcaaattttgctcaatagctttatatgtcctactcctctctcattatgacgatatgtcaatcaacaaaattgctcaaaggcatacattttcaggagaaaatgagaataacaggcgcaacggcctgatcttatgctgcttcaatatcgtcaggtggtttatcgttcgaggtcatatctatgaccataaatccctgcagggattaaccctgattaattattgcgcaacgcaatcactgccgatttgtgctggcgtcttatctggctgaatcgtgaccacaccgcaccacatctgaccacacaaataaactcgacatcctcattttgttctttccgtatgttttgcgtcatttaacaattgcaggtaggatgctccgccggcggttttatccctgtcacagaatcagggaaaagcggcattcgccattgcaggcaatcgattggtgagcgcccgtcgcggcataaggaatttttctgtcaggacaggctataacaggtaacgtaatgaaaacacagactacgcacgccgcagaacaacatgcggcgaaacgacgctggctgaacgcccatgaagaggggtatcacaaagcgatggggaatcgtcaggttcagatgattgctatcggcggcgcgattggcaccggtttatttttaggtgcaggcgcccgattgcaaatggccggaccggcactggcgctggtctatctgatatgcggcattttttcttttttcattttacgcgcgctgggcgaactggtattgcatcgcccttccagcgggagcttcgtctcctacgcccgtgaatttttgggtgaaaaagcggcctacgtcgcaggctggatgtactttattaactgggcgatgaccgggatcgtcgatatcaccgcagtggcgttatacatgcactactggggcgcatttggcgacgttccgcaatgggtgttcgcgctcggcgcgttaaccattgtcggtaccatgaacatgatcggcgtaaaatggtttgccgaaatggagttctggttcgcgctgataaaagtactcgccattgttatcttcctggtggtaggcacgatttttctcggtaccggtcaaccgcttgagggtaatgccaccggttttcacctgattacagataatggcggctttttcccgcacggcctgttgcccgcgctggtactgattcagggcgtggtgttcgcttttgcttcgattgaactggtcggtaccgccgctggggagtgcaaagatccacagaagatggtgccaaaagccatcaatagcgtgatctggcgtattggtcttttctatgtaggatcggtcgtattgctggttttgctgctgccgtggaacgcctaccaggcggggcaaagtccgtttgtcaccttcttttctaaacttggcgtgccttatatcggcagtattatgaatatcgtggtgttaaccgccgcgctttccagcctgaactccgggctttactgtacggggagaattttacgttcaatgtcgatggggggttccgcgccgaaattcatggcgaaaatgagccgtcagcatgtgccctatgcgggtattctggcgactctggtggtttacgtggtcggcgtgttcctgaattacctggtcccctcccgcgtgttcgagatcgttcttaattttgcctcgctcggcattatcgcgtcgtgggcgtttatcatggtgtgccagatgcgtttacgccaggcgataaaagaaggcaaagccgcagacgtcagttttaaactgcccggcgcgccttttacctcctggctaacactgctgtttttactaagcgtgctggtactcatggcgtttgactacccgaatggaacttatactatcgcctcgttgccgctgatcgctattctgctggtcgccggctggtttggcgtgcgacgtcgcgtggcggagatccatcgcactgcgccagtgacggcggattcgacagagagtgtcgtattgaaagaagaagcagcgacataacattccccttccccggcagccccaggcctgccgggtttaatgcgcgttgccgccaacaccgcatcgcgcccaatgcttagtcagccttaatcaactgcgccacatcattgctgttaatttcccgctggttgccttcctgatcggtataactggtcatccccgtctctttatctaactgcggcttaccctgagttacgatcgtttgcccattcttcgtcgtcatcacatagttggttgtacaacccgcaagcataaaaaacatcatgcccaaacctgagcatataaataactttttcatattttcctcgtgaatataatgagttaactacagcaaaaaggcagtgtaattctcacagaatcatcaggctatcggcggggtgtaacgaggcgtatcggtgcgtttaaagagatgactggaggggtttccccctccataccctatttacagagcaatgcgaataacatcatccggctgcgtcgcttcctgttcacgtgtcgatttctgcttcacgctgacgtagagcgttttaccgtctgccgatagcgccaggctattcgggtacgtcggcgtatcgaacgttttaacaacgttataggtcttcgcatcgatcacgctgacctgacctgcctgacgatgtgtcacatacgcctcgttacgtgtcgggttaaacaggacggccaaagaagcaggcgccgcgattttggcaagaatattgccattacgggtatcgacaaccagaacctcagtcgccttcgagtcggtgataaacgcgcgatgacctgcggtatcgagactcaggttaataaagaagtgttctttaccgtcatccagcaacttcttacgactgagaattttattgctggcggtatcgatagtgataaattcgccatccgcattggtggtgtacaggcgttgcgctttactgtcgagcgccagacccgtactcattttgccggtattttcgatcgtcgttttcagtttgatggtttcgccatccactacccaaatagcactctctttaccaacaccgctaatgtagatcgtgttggtcgccgcatcggcaaccagctcacggggctgtaacggacgaacctcttcagtacgtttgcgcgcatcaagtaccagacgaccttttacatcacccgttttggcatcaatcgcggtaactgcgctgttaatggtattgccaaaccacagcgtttgggtcgcggcattgatggtggcgccgaacggcttgagatcgttatgaatcgcttgcgtgatttccagcgtcaccgggtcgagacgataaactacgccgcctttatccagtttacggctttgcgatgtagccagccagagcgcgttttcttgctgactccaggccatctcataagcgcctttgcctaccgctttacgcagcatgtcttccgccgccagcgtgctaaatgaggatgcgacgaggagcgaacctaacaataaagaaccacgcaggcgcggcgaaaaaagatgacgtaagtgcatgacgactccctttgataaaaacgtgtatagctgcttcacactacttcgctgcgcgggatcttcgttccgcacttattataagttgagaataataatcattatttatcagaaagtggagcttttcctcgcctgcgaatgtcatggctcttaaataccgcacattttcttaacttaatgtgcgattaaaatttcaaaactttacatattgactacccttaatgtcacgttttccgttgatacgcttacatttatccggcattttcatgaaaattatttccgttagacagcgactttatcccgccctcttattgcctctgaccttctccccggtccttcaggccgccagcgcgcccaatgaacaaaccatgatagtcaccgcaacgccgcaaaccgtatccgagctggatacacctgccgccgttagcgtcattgagggagaagacatgcgtctggcgacgcctcgcgttaatttatctgagtctttaaccagcgtcccgggattgcaggtgcagaaccggcagaactacgcgcaggatctgcaaatctctatccgtggatttggctcgcgttccgcctttggcgtgcgcggcattcgtctgtatgttgatggcattcccgccaccatgccggatggacaaggccagatttcgaatattgatattaacagcatacaagacgttgaagtgttacgcggccccttctcagcgctatacggcaatgcttccggcggcgtaataaatgtcaccaccgaaaccgggagacaaccgcccacccttgaggccagcagctactacggcagttatggaagctggcgctatggactaaaagccacgggcgcgatgggtgacggcacacagccaggcgacgtgtattacacggtatcgactacccgtttcaccacccacggctaccgcgatcacagcggcgcgcgaaaaaatctggctaatgccaaactgggcgtgcgccttgacgatgtcagtaaactctcgctgatttttaatagtgtggacattaaggcggacgatcccggcggacttaccgaatctgaatggaaagccgatccgcaacaggcgccgcgcgctgaacagtacaatacgcgtaaaaccatcaaacaaactcaggcaggattgcgttatgaacgtcagctcagcgcgcaggatgatatcagcgtgatggcctacgccggagagcgggaaaccacgcaataccagtctattcccctggtggcacagctaaaaccagcccaggctggcggcgtaattacactgcaacgccactatcagggcattgattcccgctggactcaccggggagaattaggtgtgccggtcaccttcactggcggagtaaattatgaaaatatgagcgaaaaccgcaagggttacaataatttccgtctcaacaacggcacccctgagttcgggcataaaggcgatttacggcgggatgagcgtaacctgatgtggaatgtcgatccttatctgcaaacccagtggcagcttacgcaaaaactctcgctggatgctggcgtgcgctacagttccgtgtggttcgattctaacgatcactatatcgcgcccggcaatggcgatgacagcggcgacgccagctatcaccactggctacccgccggatcgctaaaatatgcgttaactgacgcctggaatctctatcttgctgccggtcgcggatttgaaactcccactatcaatgagctttcttatcgcgctgacggccaaagcgggttcaactttgacctcaaaccgtcgaccaatgatacggtggaagtcggcagtaaaacgcggattggcaacggcttgttgaccgccgcgttatttcaaaccgataccgatgatgaaattgtcgtcgccagcagtatgggaggacgcactacctacaaaaacgcgggcaaaacgcgccgccagggcgcagaacttgcgttggaccagcgcttcgccggcgactggcgggtgaaagcatcatggacctggctggatgcgacctatcgcagtaacgtttgtcaggggcaaaactgtgatggaaaccggatgcccggcatcgcccgtaatatgggattcgcctcattaggttttatcccggatgaggggtggtacgccggaacagacgttcggtatatgggcgatatcatggccaatgatgaaaataccgccaaagcgccttcgtataccgttgttggactaaatacagggtataaatttaattacagtcagcttaccgtcgatatttttgggcgggtagataatctatttgataaagaatatataggttcggtgatcgttaatgaatctaatggccgatattatgagccagcgccagggcgtaactatggcgtggggattaatctggcatggcaatttgaataaatatccggcaaatatccggcaatagcggggaatccccgctattgataagtcatagtttcatgaaagttacatgaagtactgatttttaatcgtcgctacgttttgttgcaaaacgttctgtaggcagtggcgactggcttctttatcaccagtcactaacgcattaagcaattttctgtacagattaacgccgttttgataatcatcaagtttaaaattatcatataaaaaatgcagacttggccccaggcgtacccataattgctcgatcatggcatacagcgttggcatatccgcgtagtggtagatctcaaagcggaatgcgcggttggccaaaagaattttctccataacgccactttccagcgcctgttgaaattcatctaatagcgcattcagcgtctgctcgcgatccggggtaatcttacccgcagcggcgaccaccgccatctcctccagggcagtacgaatcgtattaatttccagcaaactttccagcgagatctccggcaccataaacgcctgtgctggcgccaccgccaaagcactggaagagaccagccttaacagggcctcacgcaccggcgtaatactgacgcctaactcttgagcgatatttttagtgataagccttgcgcctggttttaatgcgccaatagacaattgatgctttaaccgattttcaacctgtgtggtcaggcttatatgttgtgttttttccgtacccggcattttccttccttcacctcttggcagaacaacatcgcaatcgagtcccgaagaagtttcggaacttaattgtaaaaaagataatccaggcctgaacggccaaataaataaaagtgataatttacttgcgtgatattctcatcttttacaacaatacaggtttctttatggcaaccgttttatctccgtcattccttcatgtatcgagatttttgaccggttcaggccgctgagggagataagctgccccaccgcgatctgaatgatgaatataagtaaagccgcaattttaaaatttgcacatttttatggcgacataatgccgccattttttctttacgcatcgtccgctaaacgtatcacgactttgccaaagttcttccccgccagcagccccataaacgcttctggcgcattttccagcccatcagtaatctgttcccgataatgtattttcccttctttgatccaacgccccatttcttgctgaaactcatgtatccggtgaccatagtcctggttgatgataaaaccttgcagacgaatacgctttttaagtaatgtcgccatcagcagaggcagtctgtctggaccgtccggcaacgctgtcgcattgtagccgctgaccagaccgcagagcggaatccgcgccgacgtattcagtagcggtaagacggcgtcaaagactttaccaccgacattctcataatagatatcgataccctgcgggcaggcctgcgcaagctgttgtgggaaattatcagcgtgatgatcaaggcacagatcaaatcccaaaacgtctgtcgcatgacggcatttttccgcgccgccagcaatacccacgacccggcagcccttcagcttgccaatttgcccaaccgttgcgcctacggggccggtggcggcggcgacaaccagcgtttcgccctctttcggctggccgatatccagtaaccccatataggcggtaaaccccggcattcctaaaatacccaatgaccaggaaggatgttgcggattatcacccagctttaccaacccttcgccatctgaaatgtcataatcctgccaaccattgtaactcaacacccattcgtctggtcggtaatcaggatgattcgacgcgacaacgcgactgaccgtaccgccaaccataacgcagccaggttcaacaggcggcgcataagagggttcatcgctcatgcggccacgcatataagggtcgagtgataaaaaaacggtacgcaatagcacctgcccttcaccgggcgtcgcgacgtcatcttcttcgaggcggaagttatccatctgcggcgcgccgtggggacgcgaggccaaaacccaacgacgatttcggttggtctgttgcttcattctattctcctcatgcctggcataatccatcaataatagtcgaacattagctttctgagggagttaaacactctcagatatcaggctgtgcgcttttatgaacgactttctcccccttctcgctaaatatgaattcttgcgctaattcgttgatttatgccgccttcaatagtatttctaacactatcgtaaacattccctggggttccctatgacgattcgctttgccgataaagcagactgcgccgcgattaccgaaatctataaccatgcggtattacatactgcggccatctggaatgatcggacggtcgatacggataatcgccttgcctggtatgaggcccgtcaattactgggctatccggtgctggtaagcgaagaaaatggcgtggtgactggctatgcatcatttggcgattggcgcagtttcgacggttttcgctataccgtcgagcactcggtttatgttcatccggcgcaccaggggaaaggactggggcgaaagctgctcagcagactgatcgacgaagcccgacgctgcggcaagcatgtgatggtggccggtattgagtcacagaatgccgcctcgatacgcctacatcattcgctgggatttaccgtcaccgcgcaaatgccgcaggtcggcgtaaaatttggccgttggttagatcttacgtttatgcagctccagcttgatgaacacgccgcgccggacgcctgctgatgaaccagtcgctgacgctcatctttttgatcgccgccggtgtcgggctggtggtacaaaacagtattatggtgcgtattacgcagacatcatcgacgattctgatcgctatgctgttgaactcgctggtagggatcgttttatttgtgacgatattgtggtttaagcaaggcgctacgggcttcggcgagctggtcgccagcgttcgctggtggacattgatccccggtctgctggggtcattttttgtatttgccagcattagcgggtatcagaacgttggcgccgcgacgactatcgcggtactggtcgccagccagttaatcggcggactggcgctggatatcgcgcgtagccacggcgtcacgttacgcgcaatggtcgggccggcgtttggcgcgctgttgctggtcattggcgcatggctgattgcgaagcgccagttttaatgggttacaggatcgtgccgcctttggtgagctgctcgcggcgcgcgtcccgatcttcttgatattgcctgccgtgatgcgcgatagccgtgcgtaaacgctgctgctgcacataacgatcttcgcgacgtaattcagcgtcatcgctcaaggcaatcagcaattcattcatatgggcaattacgctctccgcgatggcggcatccacgcgggcgctcacttcctccaggtgcgacataagctctcctactctttattctgtaacagcatgattcgcctattatacgcgttattgtcgcccgatgcggtaattcgccgccgccaccctgatttaacttacgtcaagtggaaacacggggcttaatagaccgagaattcgcgcctttttgcctttcttccgccgtttgcttgcgtatagaccccgtaaagtagacgcgtgaagaagtctaagggataacaacgtggcaaaatctctcttgcgcagcggcaatctggatgattatcaggccgtgggcggcggcggtcaggccgtatttgaatcagcattgcaaattcgcgaaacgcttcgtctgcgtaaacagcaggcgatggttgactgtctggcgattccgcaacttaacgataatggcgatcgggttgactggtattcgccgattgaaggtcaggcgatagcgtggaaagcggctgacgaagagacacgttctcgggctttacgttatttagccagcacttttgaaagcgcggctgcactcagtcgcaaaagtctgcaatccggtaaaacagcgctccagctatttggttcgctacttgagaaagcgacgcaatttcccggtgaaaatcatgttttcctggttaacggcaaaccggttatcaccttctggggattcgttaatctcaacgaaaatacacgcgatgatgtgctggactgcctgcgggtaaccgaggcaatccccgacatccctctggtcgagccggagcccgaagaaaagccgctggtagaggcggcatttagtcaggcggatgaacctttgttaacgtctgtcattgagccgccgaaaatgccggaggaacctgctgcgccgcccgttatcgttagcgagccgaagcctgccgcacctatcccggttgctgaggcgaaaagagctcgtcgtctaccgctgtggagcttacctgtcgctgccgtggttatcgccgccgtcgccacgccttttttctggccatcttcatccgttgacggggcctctcctgttcgcgccgcgcctgtcgctaccgcgaaaactgacgttacccccttgcctgaactcaccgcgcatttgccgctgcatcgcgctgaggtgacgcccgcccccaaagcggcgccgttgccggaagcgcctgttatcattgccgctatccccaaagacgcgctggtgatggacaatacgcagatgaagcttggaaccacgcgctttttaaacggtagctggcgcatcagtgtggatgtcaaagatccgattaccggcaagccgccctctctgcgttatcagatccaaaataacaaaggcatcgcgcgcgtagtacatggcgataacgtggtttgtcgggcggaaattttctctggtctgcatcaaacgggcgagctgatgattaaaagtcgcggcaatgcgcgctgcaccgacggttcacgttatccgatgccggaaattacctgtaaagcaggcgtcaatgacgtcgcaacctgtaccgcccgttatggcgaccacgcggcaattccgttgacgtttaaaaagataggtgcctgattttatgttggtcaatctgtgtgattacaaacagagcgtcacgctcattgcaaacagcggcgtccagtttcttgattttggcttaacgccgcaagagtcggcccactacggacgttttgtgcgcaaaacggcaaacggcccgctactgcgcctcgattttgatctgaccagcgggcgctacacgttgccaggacgtgctggcggccaacccgaagtcgtgaaaccggaaagcactcagacgctgcactattctctggatgtactcgacggaatctggctccccctgccgttcctgcgttttaatccgccgcgtacctttattgacgggccggataactgggcgcgcattcaggtacgtaaactcagcgagccagatagcgccggaaacacacaccgcatcaccctcgccttcgacagtcagctggcaaaaaatatgcctgcggcgttggcgccttgcgaaaacgatctgctcaatggcacacgttttgcgctcgcctggcgcgatgaagaagttgccgattttcttgaccagacatggattgacggctggctgcgcgagtcgtttcttcagtatgcctcacaggtggaaaaccgttcggaacaggccattcagcaagcgctgcgtagttttgagtatcaggcgcactggttgaatttactgacgctgttaggcgaacagcttacggtgccggaagtgaagtttgtgacacatacgttaagcacgcccgcaatcccggtcgatctgattctggatgtcggcaatacgcatacctgcggcgtcttgatcgaggatcatggcgatgcgaatgacgggttacgccagacggcagagcttcaggtgcgttctttaagcgagccgcagtatctgaacgatcctttatttaccagccgggtagaattctcggaagcacgctttggcaagcaacacttttctgtcgaaagcggacgagacgacgcctttgtctggccttccattgtgcgtgtgggcgacgaggctcgcgcccttgctatgcagcgtgtgggcaccgaaggcagcagcggtatctccagcccacgtcgctacctgtgggatgaaacccccgccttgcaggactggcgttttagccagatccacggtaaaacgcagcgcgaaccgcttgccaccgcgtttccgctgatgaatctgatgaacgatgacggacagccgttattccgcctgccgtatgaagaaaggctaccggttttttcgccgcaatacagccgtagcaccttgatgacgcatatgttgtgcgaaattctggctcaggcgctggggcaaattaacagcgtcgccacccggctgcggctcggctttcccgcctcgccgcgccagctacgcaccctgattttaacgctgccttccgccatgccgaaacaggagcgagaaattttccgccagcgaatgtttgaagcgctggcgctggtctggaaagccatgggctggcatccgcaggatgaggatttcaccacgcctaagcagcgtgaaaaaagcgtggtgccggtaccagaaatacagatggaatgggacgaagcaagttgcggccaactggtatggctttataacgaagccatttcgcattacgccgggcgtaccgaatccttttttaatgcgctggccagaccggatcgccagcctgaacccggcgtcgtccccgggcgcgcgttgcgcgtggcatcgattgatatcggcggcggcacgacggatatggcgatcgttcactatcagttagatgacggcgtgggggccaatgtaaaaattacgcctcatctcctgtttcgcgaaggttttaaagtcgccggggacgatctgctattagatatcattcagcgttgcgtactcccttccctgcaaacggcgttgcaacgggcaggcgttacggatgccgccgccctgctggcgaccttatttggcgattcgggacgaattgatactcaggccattttgcgccagcaaacggcgctgcaattatttatgccgctgggccatgcggtactttccgcctgggagcaaagcgacattaacgatccgtttgccggtttacatgcgacatttggcgatctgctgatccgccgcccaacgagcaacgtgatgaactatatccagcaggcgatcgatcatgccttaccgtctggttcgccgacatttgatatattcaatgtgccgttgcaaatccagtttagccagcttcaggagtctctgctggccggtcagtttacgctgacaacgccgcttcatgcggtctgcgaagcgatatcccactatcactgcgatatcttgctggtgacggggagaccgacctgtttacccggcgtacaggcgctcatccggcacttacaaccggtgccggttaatcgcattgtgtggatggataagtatcaggtacatgaatggtatcccttcagtcaacaagggcgtatcggtaatccaaaatccactgccgcggtgggcgcgatgttatgcagcctggcgctggacttacgtctgccgcgtttcaattttaaagcggctgatatcggcgcgtattcgactgtacgttatctcggcgtactggataataccgttaatacccttcgcgatgaaaacatctggtatcacgaaatcgatttggataaacccggcgcaacgctggacgctcgcttgcattttccgctacgcggtaacgtgacgttgggctttcgtcaactggcgaacagtcgctggccagcaacaccactttattgcctgagcattaattccgccgaactggcgaaaaccatcgctggcgacggcgtactgaatgtgcgactgaaattacgcggcagtagcaaagatagcgccccggaatcgttcatattaagtgatgcctggctccaggacgggacgccggtcgccgccgatgcgctgacattaaaattgaatacgctggctgaccgtcgccacagcggcagccactactggatagatagtgggagtgtatacctgaaatgacaaaaccgttaaacaccacccaggctgttatcgagtgggttaacaacacgcgccgttacgcaacgcgactggatgacgaagccgacgctctgctggcgcaacttacgcttgccgcggcggatgagtcagcgctcaacgccgcctgcgcatcacatggctgcgttggtctgtacgggtatgcgcaatccgcaaaagcgcatctgttaacgacgctatgcggtaacgagaatggcaagctggaaattatcacgccggaccgtgactatgattatttcagccacatcaatccgggtcatgcgccagcgaatatggctattcgctttacgcgcgacattttttcaaacgagagcggctggccgttgcgcctgcgcttgatcagtgaagccgaactggtgcagatctttattgcctggaccagctcgtcccccgtttgtcgccaggtcgaaaaatccattatcacatcacgcctggagaaatggcaatcgcttcgccaaccgcagcccgtccccggcgttaccgctgaagaggtagcgaccatcgcgagtttctggcgctcttgcctgccgtccgccagacaacatattgatgatgcgacatggcaacactttgcctcgctcttgcctgcgctggatctcacgacacgggcgcacgcctgggcattactgtggggagagcaaccggagatcacccagcaatggctggcgctggcgcatatgttgcaacaaaccggccatgccggggaactggcggcgccgctcagcctgctggtcgatcattttggcttaccggcggaaaacttcctgacgcaaatggcgctaaccgccaacgatacgcaaagcgatgtggtggtgcatccggttaaggaaggccgactgctcaatgcggtcagcctttcgcttgattctctggcgctgcttacccgcgaactggtgctaagcgttgaaaacaacgtactggataacgtagatttactggatattccggtcgcgccagacagtcatcctcatccgttatggcgggcgaaattaggttggatgctggcccattaccgccaacaggtacagcccgatgttctggtgatttgcaatgctctggcatctcgctcgcaaacgtccactgccgcccatcacttactggagtgggttaacgccacgcagccgcagcatgaatcagcgttacccggcgtcgtctgggctattactccacaggatgcccgttttgccacccagcaaaatctggatgaagccgtccagcagttgatgggtaaacctggcgtgcattggggaacgttgcaggcgctggataaacacagtatgcagcgtttggtggaatggttatcgcaggcgacatcggcaccacagcgacaggcgcgcttacaggcgttacgcgaacaactgcgaggccgcgtgcgcgatctgttaccgatgtttgatgacgcgcggctaccggttgaaaccgtgatccggcgtcttcaggcccaggccgccagacatggcgacctgctggccgggctgttaccgccggtacagaacttcgaagcgttgctgagcacccgacagtcacgagaagaacaggtctgcggtttatttaatgacgcgatcgatctctttgccgacgaaccaacgcgcgcttcagcgtcagaaggtcacgaaacaggctaccaggcgcacaaaatgtggatcaatcatctgcgccagtgggcccactgccgggataatgcgcagcgtctgggactggaaccgcagatgctcaacgccgtggcggagattttaattaccgccagctatcgcctcggtttacctcagcagttacagaaaaccatgcagcgcgaggaggtgagcggcgcgcagcttcatgccatcattggtaacttcatcgcctggctcggctacgccaatatcgaggaggcccaacgcccggccagccgcgttcagaaaggcgcagccattttcgccgcaacaccgcgttcgacaatgttgcgtctaacaaagcttgacgaacagcccgttcatgccgccagccgctatgtctatgactggcttgttgcgctgtataccctggccaatgagaacgcaggatatcggcatccgcaggacgttaccgacgtagacagagcgcaattaattgccctgatagcctgacctggcggaaaaaccatgcccggtaacctgtatcgggcttgaggtcagaaaagcgaaaacagcaatgcgacggggaaacttatcggccatgtcgcgccaaccaaaaaggcgctcaggaaacgaattcgttttttgtcatgagtcaaaaaccaggtgatcagggatgatatcaccgccatgacggcgtaaaaaattaatatcttttgaaagagggtcatatcaggcatccacgccaaccagaggaaaaaacgcgcgcaatatgctctttttatttgacgcacatcaaggtttatcagccttaacagcaaaacgttctcaatgcacggctccgctcacagaatatcctgtttaggtattattgcggatctcgccaacccgtactatacccataggggttatgatgaaaggtggcgaaaatgaatgtttccagtaaaaccgtcgtgctgattaatgtctttgctgctgcaggacttttgggtctgatctcgttgagattcggctggtttgcttgaggtgttcaacctttgagtacttgctgcgcatgttggcggggaggtccccctctccgccaacacccgcctattttttcacgatttttctgaacagtaaatgatccttaatgcttaaccatgatgtggcggacaagggtgtagtcttccagaccatacaatgacatatctttgccgtatcccgactgtttttgccctccatgcggcatttcgctaaccaacatgaaatgggtattaatccaggtacagccatactgcaatctggcgctaagccggtgcgcccgcccgacgtcctgagtccagacggaggatgccagaccatagcgagaatcgttggcccacctcagaacctgatcttcatcatcaaagacggttatactgaccaccgggccgaagacctcgcgttgcacgatggcatcttcctgttttgcgtctgccagcaacgtcggagcgaaatagtaacctttaccttccgtttgacttccgccagtaatcacacggatatggctgagggccttcgcctcctctacagccgctgtgacgcgcttcaggtgcgccagcgaacttaacggccccagctctgtcgactcatcctccggcgcgcccattttcaggctgctcactgcgttccctagcttttcgaccagcgcatcatagataccgcgctgcgcgtatatacggcacgccgcagtacaatcctgtccggcattatagaaaccaaaagtccggacgccctgcgccaccgcatccagatcggcgtcatcaaaaacaatcaccggggctttaccaccgagttccatatgcgtacgttttatcgctggcgcagtatggcgcagaatatgctccccggtcgcgatagaaccggttaaagagaccatgcgtactttttcatggccggtcaatacatcgccaacagtttgccctcgtccgaacaggacattgagcacccccggcggaaagatatccttcgccagcacggcaagtttaagcgccgtcagcggcgtgatttcagaaggcttaatcaccacgcagttacctgccgccagcgctggcgccagcttccaggccgccatcatgagcggataattccacggcgcgatagaggcaaccacgccaatcggatcccggcggatcatcgacgtatgtccttccagatattcgcccgccgccagcccactcaaacaacgggccgcgccggcaaaaaagcgaaagacatccacgattgccggaatttcatcattaattacgcagtgcaaaggcttaccgcagttttgcgattcaagccgggcgaactcaagggcgttttgctcgatgctgtccgccagttttaacagacattccgcccgtgctttgggtgtggtctgcccccattcggcaaacgcgttatcggcggcctgcactgcggcgtcaacctgcgcgggcgacgcttccgcaatctcaagtatgacctcgcctgtcgccgggttataaacagactgcctttctccctcgccgtccaccagcacgccattaatcagtaattgatattgcatagcattttcccatatcgtcattaatcgatttccggcgaacgggccgccgctttcctaaaaatagacggcgcgccagatgctcacccggcacactcgggaaatttagtcaggttgtgagctgacacgcattccacctcacacaaggcttttagcgctcagcatctcgcgaatcaggctgccaagctgttttacggcctgttcttcccgttctccccaatgccatgcggtgttaaaacgaaagaaacgcgtccaggcgccggacgttgaaaacattttccccggcgcgatactgataaggtgttcaagcgctttggcgctaagttcaccggcatcaagctgctcaggtagctccagccaaagaaaataaccgctatcgttatggtgaatttttacttccgccgggagatggcgcaaaagggtttgccaggcttgctgtttacgttcggcaagctgccttcgcaatcgtcgcagatgcgcgtcatatcgacgtgtcgagagataatccactaacgccaattgcatgggggaactggtggataatgtgctcattaactgcaaacgctgaatttgtctggcatggcttcctcccgcaacccagccaatgcgaaaaccgggaaccagacatttggaaaaagacgaacaatgcaacacggtatcgtcgcgatcccatgctttggcaggcagaggtttctcgcggccaaagtagagttcgctataaacatcgtcttcaattagcgtcacgttatggtgcgtgagtaacgcaaccagccgcgcttttttctcagcactcagcgtgaaccctaacggattctggctgttggtcattaaccagcacgctttcaccggatattcctgtaacgcctgttccagcgccataagatcgataccttctttaacatcggtaggtatcgacaacgctttcaggcgcaatcgctccagggcctgtagcgcaccgtagaaacaggggttctccaccaccacccagtctcccggcgccgtcaccgcctgtaaactaagattcaacgcttccagcgcgccggcggtaatgacaatctcgtcaggagaaacggtaatcccctgctgcgcgtaacggcgtgctatcgcatagcgcaattctgcattacctggcggcaagttttcgatgacgctcattgccgtcgcggttttgctgacctgcgccagagagcggttcaattgcggcaagggaaacagacgcggatcgggaaacgctgaggcaaagggcaccacagaggtatcacggctcgcctgcagcatctcaaaaatataggtattgatatctacggcttcatcccgaataacgtgcgctgccgtcgcgactgaccgacaaaccggatgcggcgcgacataataaccagattgcggacgggcgataatccgtccctgactttccagcaactggtacgcatgaccgacagtcataaaactcatgccgctactggcgacctgctccctcagcgagggtaatcgatcgccgggttgccaaacgccagaggcgatttgttctctaatttgctccgccagacgttgatattttttcattattcgatctcattgagcgctgcttgcaggtggcaaccgcagtgtatatcagttgttaaaattaacaatgatttgctaactgttatggtgctttccaacaggcgtaatgattagatttcgcaacaaaacgccgtttcagggtctctgcttaacgggaaagtcaaaccaagtgttcgggtatggttcatgagtaagagagaagtgccaccattcagtatccagtggcgtaaaacccgcatcacgcatcaatgtttgtaataacaacctatttgcgcgttgctgagcggtaagtatgacattatcgggatgggataacggactaaaacagtcaaagccggtaccaaaatccagactattatctggcgagcgttgcgccgcggacgcagtacaattcaccagtggtcgtccgggatcgtatattggtattttactgtcaagtggaacaatcgttagatcaagcgtacttccccgactgtggccggatctggcggcaagataaccttcctcaaacagacgatttttctctacctgcggataaaattcgtttttcatttggttttgagaaggatctttggcccacgcgataaagtcgttcactgcgctttgcggacggtagcaatcatatatttttaaggtaagtccgaaggggcgtaaacgatcggcgacctgcttcactgcgttcgcggctggtcgtgttaacaggcaaacaggcgcgttatagcctttaatggggcgaccaataaagttatgggaactgaagtatcgcatgtctacctgtacgtcgggggcgaccgtagtaatatcgacaaagtcttttggctggtggagatcaatatggttttcagctgacattgcctgaacggacaacaggctgaacaggaggaaagaagatacgcattttaccatatgttacacctcgcgagagtcacaggggtgattatgtatttgagcaggtaaagattagcggacaccgcttaaacagatggttaaaataaacatctttccccctgtaatctgtgccttatcacaaacggagagtttatattttgcttatacgaccactgcgcctcctgttctatacccaaaataattcgagttgcgtaaaggcggcaagggagtgagtctcaggagcacagataacgatgtgttttcacaaaggcgagtctacctgaccagaaaggtcatttgataatcagtagtacagttgttgtcgccttccataactaaataacattgtttcgccaaagataagaccactatatagtcaggaaggcaattagtgaggaacacgtcgattgtcggcgataatgcactgaaattacgattcactgcagttgtgcaaacacatagaatccccctcgaaccgagataattcggtctgctggtcatagccattattcagtaagaccgcaggttgcagcggcggatcacgggcgtgaagaaacatcctgtgccccaaattttttggacaagcgctgaacctgccgtatacttttacttaacgtacactccgccataaaaataaaccctgcgatgataccgtaatgccataggcataacttaaggatatgccataaatcaagcgaagcatgatttaacttctcagtaattgcgatagtctgtacaaatattatgggatgaaataataagatgcctaacaaaaatatccctgccacgatcatggcaagtaactgaaaaaaagcccatccgataacgaaacggtaaagtaacagcaataatagccgtccacatttccttagccattctgactgcaaaatgccccaggatgctgtcttttcgtgaatttcaccatctgatttcttcattttgagcctcctcgcaggtttttataattttatcgcccaactggaaacaaagccgtcagctaatcgttacaacaaatataattaagacaaaaactaaagagtaagatatttatatcataagcactatcagtattggccttctgccctaccgctaaacatctcattgttgttagcctaataatacttttagtttaacttcttataagacaatttctacacggttgagcaactatttactttctctaaaaataatatagtgcgtaattaatcattactcatagtacatgatgatgtgagaattaagaaaaccgttttactttcattcgttttatctgacatatttcatggccaggaggcgtgggcatgactaaagctacgggtcgatttgaacaattgaacaataatgttgacggttcaggacaaagcaaaaatcaggtgtttcaccgataggcaaaccgatgggcaacatgggataatatttcgaataccacctattccagtaatgaagtatcatataatcacttgtggtctacattatgccaattactatcgggagaggatttttaaagagtgagatgttttctcaaagtgctatctctcaacgctctttctttacgttactatgggaaaagattaaagattttttttgtgacacgcaaagatccactgccgatcaatatataaaggaattatgtgatgttgcctctccgcctgacgcgcaacgtttatttgatttattttgcaagttatatgaattatcatcaccgtcatgcagaggaaatttccattttcagcactataaagatgctgagtgtcagtatacaaatctctgtattaaagatggcgaagatattccgttatgtattatgatacgtcaggatcactactattatgagataatgaatagaacagtgctctgtgttgatactcagtctgcccacctgaaaagatattctgatattaatataaaagctagcacttatgtttgtgaaccgctatgttgcttgttccctgagcggttacaactctcgctatccggcggtataacattttccgttgacctaaaaaatatagaagagacgcttatcgccatggcagaaaagggtaatttatgtgactggaaggaacaggaaagaaaagccgccatctcctccaggattaatctgggcatcgcccaggcaggtgtaacagctattgacgacgctatcaaaaacaaaatagccgcaaaggttattgagaatactaacttaaagaatgcagcgtttgaaccaaattatgcacaaagctcagttactcaaattgtttattcatgtttgtttaagaatgagatactaatgaatatgctggaagaaagttcctctcatggcctgctatgtttaaacgagcttactgaatatgtaacgctacaagttcataacagccttttttctgaagatttatcttcactcgttgaaacaacaaaaaatgaggctcatcaccagagttgatcacaccataaatagtatggatttacaatcccctggcaataccaaaaccatctaatacaataactttaaatatatactcccagggaataatggatttactatggaacgaattggctcgttatttttataattgacatactgagtataagtatattttctcatacaacttatcgcacttattgacaaaccgttttcgctaatttgaagtgtggaataataactcaaagaaattattggcatcatagcctcacgacgtaactggaaggtggcatgatgcttacaaaaacgttatcagtagttttactgacctgtgcgctgttttcaggccagttactggcgaaacagcaagaccacgcattcgtatggtttgcgacgggagggcaccagcttagacacgaagccgacagcgatgaattacgggcggcagcggaagaatccgcggaaggcttgcgcgagcaccacaactggcagaaatcgcgcaaaccagaaagctattttcgttaattaaacgcccctgcgcttcggcagcgttttcatcagcgcttcagggctcactgaagcgacaacgctgccgggctggggcatttttaagatgtggtttttaattttgccaatgacatgcatttcgcaagggcggcagtcgaattttagcgtcagtacctcatcgccatgcaccaactgcatcggcgtggctttccagctcttaatatttcctttcgcctgctttggacaaaggttgaacgcaaaacgcaggcagtgtttggtgatcatgaccggtacctcgcccttctcctgatgcgcctcataggccgcatcaatcaattgtacgccgtaacggtgataaaattcccgcgctttgtggttgtagacattagcgagaaagctgagatgcgtttgcgggtagaccggcgcaggctgcgccacgggtttccgacgacctcgttgataatgggccagccgcgccgcgtcaagcatatcaatcgcctcccgacggaactgattgagcaggctatttggcacgaacaacgccgccggtaatgtcacctgcatatcacgcgcgtagtaaggcgtctgtcccagcttcgccagtccggcttttaggttattcaacgctttttcagagttgttggcttcctcaaataccccatcaagcgtatgcgtgatgcagacaccgtcttcactggtcagcgtcagaataagctgttcctgccagccgcccagcatgatatcaaccgccacacggcgctcactggaggtttttgtcagcgcttgctgccagttatgatccagattacgattcaacggatgatgcggacggactttatgcaggtcggcaggcatatcatttggccaaacgcggtagcggttatgaccggttttctccaccgtattggcgcgaaaacctaccacttcacgcttaatcaacacgttcagaccatcgccattcgccaacggctccgtagcttctacgtcgagataatccttcgccacattcagcacctcacctaccggcaagccaataaattttggtgaatcaaatgcgccaatatcacctttacgcgcgttaacaaaatagtcggtgctgccgcgatggaaggttttctccgtggagggaacaaaaaagtgttcggtccgaccaaccgacgcacgcgccagatcgccacgttgctcgataatcgcgtccagcatctgacgataatgcgcggtgatgtttttgacatagctcatgtctttatagcgcccttcaatcttgaaggaacgtacgcctgcatcgatcaacgcgccgaggttagccgtttggtcgttatctttcatcgatagcaaatgtttttcgtaagagaccacccgcccctgatcgtcttttaacgtatacggtaaacgacaggcctgcgaacagtcgccccgattggcgctgcgcccggtttgcgcatgagagatataacactgcccagaataagcgacacacagcgcgccatgaatgaagaactcaattgtggcgtcagtagcctgatgaatagccgctatctgactcaaattaagttcgcgcgccagtacaatctgtgaaaaaccgacatcggcaagaaacttcgctttttccacgctgcgaatatcacactgtgtactggcgtgaagctcaatcggcgggatatccagttccagaatgcccatatcctgcacaatcagcgcatccaccccggtgttgtacaaatcggtgattaaccgctgcgcgggctccagctcatcatcatgcagaatagtattcagcgtgacaaaaatcctggcgccgtaacggtgagcaaacggaaccagatcggcgatatcgcgcagactgttactggcgttatgacgtgcgccaaaaccgggtccgccgatgtagacggcatctgcgccatgcaaaatcgcttcgcgagcaattgcggcgtcacgggccggacttaacaattcgagatagtgaggttgctggcgcatacagtcgttcttatccaatagaagcgaaatggcggctattgtagtcagaagcgcaaactaacgaaatagttttcccgcttaatcacgtgggtaatggatcagcgagtgaaaatgaaccgtctggtcactgctgttgcgataggtatgcgccgtatcgccggcaaaacgcaaacctttaccggcgtctatggtttgccataccccaccagtacacatgtccagccgaccctgaatcaccaccacatgttcgataacgccggctttatgcggcgttgattcgctgaccgtgccaggcgccagcaatagggaaaaatagtcaaaacagagttcaggatcccatggaaacaacggtgtgattaccatcgcttgctgctggggatcgaaggtcggaggaaattcggcctgcggcggcgaaataaacactgagaatggaacgttcaggcccgtcgcaattttccacagcgttgcgactgtcggactggattcattacgctctatctgccccaacatggcttttgagacgccggagatctccgccagacgcgataaactccagcctcgctgatggcgtaacgttcttaacgtggtcgccagatagtgtgtcaggttatccattttcccccctgtaaggccatagcgtatcacttgtacgctataacgcacaatgctacattgactgactgttataacgcacaagaggcgatcatgcgtctgttatcactgccgttacctactgtattatctggtctggtcgccgttctggtcggctatgcgagctccgccgccattatctggcaggcggcgcttgccgctggcgcaacacccgcagagatcgccggctggatgaccgccctcggtatagccatgggcataagcacactaacgttaaccttgtggtatcgtgcgccggttttaaccgcctggtcaacgcctggcgccgctctgttggtaacagggcttcagggattatcgttgccagacgccgtgggcatattcattgtcgccaatgccctgattgtgctgtgcggcgtcacgggattgtttgcgcgtttgatgcggataatcccccattctcttgccgccgcaatgctggcgggaatactgctacgcttcggcctgcaggcgttcgggacgctcaacggagagtttgtcatgtgcggcggtatgctattggcgtggctactctttaaagtattcgcgccccgctatgccgttattgctgccatggtaatgggaataacggtggcgctcatccagggtaaggtggcgatgagcggtattcatttcgcgccggtgtggcccaccttcgttcccccccacttttcattcgctcaaagcctgagcgtcgcggtaccgctcttcctggtgacgatggcatcgcaaaacgcccccggcgtcgccacaatgaaggcgtctggctatcagcttcctgtctctccgttaatgatttttaccgggttgctggcgctgctgctttcgccatttggcgtttattctatctgcattgccgccattacagccgccatttgtcaaagcccggacgcgcaccccgatccaacgcgtcgctggttagcggccgccgccgcaggcgttttttatttacttgccgggtggtttggcggttcgataaccgcgctgatggtcgccctgccggttagctgggtgcaaatgctggctggtctggcactgttaagtacgattagcggtagcctgtatcaggcgcttactcacgaaagtgagcgtgacgcggcagttatcgcatttctcgtcaccgccagcgggctaacgctgatgggcatcggatcggcattctgggggttgatcgctggcggaataggctacgcagtattaacgagaacgcgccgcccatcgttgtctggctgatggtggccgctaatctgccggggtttgcgccatcttgcgatggcgccgcagaattattttttattaacgtcaaacatagaggtatccgtcgccatatcatccacgacctgtttcaacgtctcaaacgccattggcgtactggaattgctcaggtctttaccttcaccctggcgtactaccttgacgaccggcttgttggtcgcggcatctatcagctcaccttcaaaatagaggtgggtatccatggtccggtggcccgtcgccatttgcgtgcccgccacaatcagcgctacagggatcacctcatagaattgcagcccttctttgctggtatccacgcccgtaatcgccccgcggaaaatcaaactgcgcggccctggcgtcgtgaccagcggtttgcgctgttcaattgctgattttactttagtgttcgtataagccagcagtttatcaagaacttgctgcccgacctgggtcgttggtttggggacgggatagtatgttatcggattgtaaacaatactgtcatagttagagtcattgaaatgtggatctacccagcgcaacaccggtttccccgtggcggaggtagtttcctgcaggtccgaataattttttaagaatccagaatacttatccggctgtgtgactttagacgcacagccggataacgccagcaagccagtaagcactgcaactttaaataaagtatgagtacgcatgaaacgatccctttagtcttcgcaatgatgcaaaggaaataatagcaaaacgaaatcattctggatgcactaaaaatggtaacgacagcacaatttgaacgcggcgcccgacaaaaaaatgccgaacgcagcgagacttacagaacttgcatcgctcaggccgtttttctcgccagcatcgtagcaaagcgcagtttgatacggttgccattttcgtccgtgcggtgaagctcgccgacatcttcgttgtatttcagcatgtcccatccttcgtaatagcggcgtaattcgccttctttaaaagcgaacgggaatcccaccgtacagggaaagtccggcgtatccattgccgcaacaatcaaattatacccgccgggttttgtgcagcgttgcatattggcaattaaaccgggaatggtttgcgcctcaagaaacatcataaccaccgtcgagagaataaaatcgtattcgccgtcaaaggtcaatgtattcagatcgacaaggtcggtttgcagattatccagcccttctgccgctttaatacgctcaaggttagccatactggccggatttttatcccacgcggtaacgtcataaccgttcgcggccagatacagactattacggccattgccacatcctaaatccagcgttcggcctggcgcgacaacctttgccgccgccagcacatccgaatgcgtgcgggttaaaccgtatttctcagtaaagtaattttcgtcacgaacggtcatttttttcctccgttttcaacagtgcagcgcgctcagtgcgaataagcaacgtcccctgcaccagcaatagaaatgtacgaaccagcaataaagcgataatagcgttagtgaaaataaacagcgggacggccagaatatggaaaagccctgattcactaccgtgaccaagatgtaaccccgtggtcgccagcgcggaaacgccgaacgaaaaactccagaaggaagcattaaacggttgtgataaataccagggcattaatcgcagcataaataaaagctgtaacagaccgtagccgaatagcattttcgccagcgtgtcgccctccccgccattgacgctcagccaggcgctacaggcgaccagcgcgggcgccagttggatacccagcgacgtacgcagcaccgccggtaattcgccgcagctacgcagtcgctgcaaaataaccggctccagacttaaccacgaaaagacgcctgcgcctaaaaacaccagtccggcatcattgtaaccgagcgctccacaggccatagcgctgataaaattattcgctaccgtgggcagataaagtcctggggttgtcgcttcttccggatgcgctccgcgccaaagtcccgccgtctgccaggcggcatacgccagttgtatgacgacccccacgctgaatagcgcaacggccaacgggcgataccagggaacgaaaccgatcgcgaccagcatcgtggtggcgggaaacaggctgacaaaactgctcattaccggatgtcgcacttcagccatcacgctatggggaaagcgcaccagacggctaaggaacgccagggtcaagagtgcccaaataatcatcgccaggatcaccatgatgtcgccgggccagtggcttattccccatatctggctggcataacgccaggcgaatcccataccgatagtgccaaggacgatgccaaaatagcccgcaggcagattgagcacgcgatcgctctgcttgtgattacgcattttgtttaatttataaagtatatttgaaatgcattttatggaatttctggttgtttcgccagtacctttgctacggttatcttaatcgttcacacggaatttccctatgaccaaatatcgactgagtgaagaacctcgtgcttttacttatcaggtagacggtgagaagaaaagcgtcttattacgacaagttattgccgtaacggattttaacgatgttaaagccggaacctccggcggctgggttgatgccggtaatgtgctgtcacaacagggggattgctggatttatgatgaaaacgcgatggcctttgcgggcacggaaattacgggtaacgcgcgtatcacgcagccgtgctcgctctacaataacgtgcgaataggcgataacgtctggattgatcgctctgatatcagcgatggcgcgcggataagtgacaacgtcaccattcagtcctcttccgtgcgcggagagtgtgcgatttatggcgatgcccgcgtgttaaaccagtcagaaattctcgccgttcagggactaacgcatgaacatgcgcagattttacaaatttacgatcgcgccaccgtgaaccattcgcggattgtccatcaggtacagctttatggcgacgccactatcactctcgcttttattgagcaccgggcggaggtctttgatttcgcgctcatcgaaggcaacaaagacaataatgtctggatctgtgactgcgccaaagtctatggccatgcgcgggttatcgccggcacagaggaagatgctatccctacccttcgctacagctcgcaggtagcggaacatgcgttaatcgaaggcaactgtgtgttaaaacatcatgtgctggtaggcggacatgctgagatacgcggaggcccgattttactggacgaccgcgtgctgattgaaggccaggcctgtatacagggcgaaattctgattgagcaccaggtcgagattagcggacgggcgacggttatagcctttgacggcaatactattcacctgcgcggcccaaaagtgatcaatggcgaggatcgtattacgcgtacccccttagtcggttccctttaatccgcatcaataatgcgggcatacatattaacgtcgtgatagtcgccgttaagatactccgcctgcttcatacagccctccagcgtaaaatggttgcgccgtgcgactgcgttactggcctgattatcaacgcggcatttaatgacgaagcgccgaatatcgccgcgccgggcataatgtgtcatcagcgcctgtaatgattgcgacattatcccttgtccctggaaggactcatccagccagtaaccgatataggcggctttgtttatcggttcgatggcattaaatgagagtacgcctgccatctcattctggcagaaaatcaggtacattttggcgtaaccacgctggtgcaacagtatattaccctgcacatgcttacgcgtttcctcctgcgacgtgacatattgcggccagtcgagcgactgttgtagccacgctttgtttttgagtaccagttggtgcagcgccggaacatgactttcatctgccgctcgcagttccagcgtcgtgctaacaggaataatttccaccatcgcgttgcccttcttcgttgttggtcgtgatcacataaatagcctggtttaccgataacccgcaggtgatatgagcgtttttattgtatcgccatcacattattttttattggccatatttagcgtatttccgcgtgacacatttcacacttatccaaccattctccgcctataaaacgctcaacgactgattgttttatcaccacggagacgccaatgaccttttctgtgcaggaaacgcttttttctttactgcggctaaacgggatttcaggacatgaaaacagtattgcaaacgttatgcagcacgcgtttgaacagcaggccaaagacgtctggcgggatcgcttaggcaatgtcgtcgcccgttatggcagcgataaacccgacgcgcttcgcctgatgatttttgcgcatatggatgaagtgggttttatggtacgcaagatcgaaccctccggttttttacgttttgaacgcgtaggcggcccggcgcaaattactatgcccggttcgattgtgacgcttgccggacgttcaggcgatatcatgggctgtatcggtattaaagcatatcacttcgcgaagggtgacgagcgcacccagccacccgcgctcgataaactctggattgatatcggcgcaaaagataaagcggatgccgaacgaatgggtattcaggtggggacgccagtaaccctttacaacccgccgcactgtctgggcaacgacctggtatgcagtaaggcgctggatgacaggctggggtgtacggcgctactgggcgtcgccgaggccctcgcctccacaccgcttgatatcgcggtattcctggtcgcgtcggtacaggaagagttcaatattcgcggcattattcccgttttacgacgcgtgcgccccgacctggcgattggtattgatatcaccccctcctgcgacacgcctgacctgcaggattactcagatgtgcgggtcaaccacggcgtcggcatcacctgtctgaactatcacggacgcggtacgttggcgggactgattacgccgccgcgtttgctgcggatgctggagaccaccgcgcacgaaaataatattcccgtacagcgtgaagtcgcgccaggcgtcatcaccgaaaccggctacattcaggttgaactggacggtattccctgcgccagtctttctattccctgccgctatacccactcgccagccgaagtcgccagcctgcgcgacctggctgattgtatccgtttactgactgcgctggccaacatgtcgccagaacagtttcccattgagcctgaaacaggcgctacacaagaggcacgaccatgatgaaaaagatccttgtggcatgtggtaccggcatgtcgacatcaaccatgattgcacaaaaactgcaggactttcttgcggagcaaggcattgcggcaaccacggcgcaatgttgtctgaatgagatcccgttgaactgtaacggtatggatctcatcgtaacgtccatgcgtacgcacagtgactatggcatcccgacgctcaacggcgccgccctgctgacaggcatcaacgacgacgcattaaaacaagaaatcaaggcgctgttaacacaataaagggggcattatgtttgattacatcctgtctctcggcggcaccgtttttgtgcccatcattatgattatcatcggcttaatctttcgtattccctggctgcaggcagtgaaagccggggtgacggtcggcatcggttttgtcggcatggggttggtgatcgtcatggcgatcgacagtctcagtccgccgattaaagtgatgattgagcgttttggcctgacgctgcatgtgtttgacgtcggcgccgggcccgcatccggcgtcggctatgcgacggccatcggcgcgatgatcattcccgttatctttctgctcaacgtcggtatgctggtgactcgtctgaccaaaaccatgaacgttgatatttataactactggcactacgccattaccggaacggtcgtccagttgatgaccggcagtctgatttatggcgtactgggcgcgatttgccacgccgccttgtcgttgaaaatggccgactggacggcgaaacgggtacagaacattgtgggtctggaagggatttctattccgcaagggtatggctccagttccgtgccgttgttcgtattgctggatgcgatatacgaaaaaataccgtttatgaaaggacgcaatattgatgctcaggagatccaaaaacggtatgggatggttggcgacccggtgatcattggcgttgttctcgggctgatcttcggacttgccgcaggcgaaggctttaaagggtgcgcaaccttaatgattaccgtggcggcgattatggtgctgtttccgcgcatgattcgccttatcgttgagggattaatgcccatttccgacggcgcgcgtaagttcttccagaaacactttaaagggcgcgaagtctttatcggtctggataccgcagtgacgttaggccacccgaccaccatcgcggttggactgctgttaattcccatcatgttaattctggcgagcatactgccgggcaataaagtcctgccgctggctgatttaccggttgcgccgttttttatctgcatggccacggttattcatcgcggcgatctgattcgtactctgctcagcggcatcattgtcatgattaccgttctgctgatcgccacccagttcgcaccgtactttaccgatatggcgctcaaaggcggctttagcttcgccgctgaaaacgcgcaaattaccgcgctgtcggtgggaaatatgtttggctggtcaatatctgaattgatgtcgctgggcatgattggcgtggttattgtggtcggcattgtcgccagcatcatacttgtcttacgtaaacgtgaactaccggaataaggagcaacccagaatgagttggctaaaagaggtaataggaacagaaaaagccgttatcgccatgtgccatttacgggcgttgccgggcgatcccgggttcgataccaggaaaggcatgaactgggtaattgaccgcgcccatgacgatttaatggcgctacaaaatggcggcgtggatgcggtgatgttctccaacgaatttagtctgccttatttaacgaaagtcagaccggaaacgaccgccgcgatggcaagaatcatcggtcagttaatgagtgaaatccgcgtaccgtttggggtaaacgtgttgtgggaccctgtggcctcgtttgatttggcgatggcgaccgacgcaaaatttatccgcgaaattttcaccggcgcttacgccagcgattttggcgtctgggatacgaatgtcggcgaaaccattcgccatcagcatcgcatcggcgcaggccacgtgaaaacgttgtttaacatcgttccggaagcggcggtgtatctgggaaaccgcgatgtctgttcaattgcgaaatcgaccgtatttaacaataaccccgatgccctgtgcgtctcggggctgacggcgggcgctcgcacggatagcgccatactgaagcgagtaaaagagaccgtccccgacacggtcgtgctggcgaataccggggtgtgtctggaaaacgtcgaggagcagctctgcattgccgacggatgcgtaacggcaaccacgtttaaaaaagacggcgtcttcgccaactttgtcgaccaggcgcgcgtggcgaagtttatggagaaagtacgccatatccgacaataaaatggggataagcaaaacgcttatcccctgcagagagcgataactcttctgccgatctccgtcgccttcgccaaaagacacgccggggatcggttccagagtaacccgaaccggcaaggagtcaacgatcgatgattaatgatgttaagtgggttcaggcgcaacgccatgccagcgactggcgacacgcgctggatatcgccgttcgtccgctgattacgttcggcgcggcggccccctgctacctggacggtattattgagaacacccttaaatgggggccatattatcttatcgcgccggggattgcgctgccccatgccagaccagagcaaggcgccaaccataatcaaatcagcgtcactacgctatcaacgccggtcgctttcggcaatgcggattgcgatcccatctggctgttgctttgcgccagcgccacggatgccgaagcacatattcgcaccattcaacgcatcagccagtggctcgactcgccggaaagcgtcgcgatgttgcaagatgcgccaaatgatgccgcgcttttcgcgcaattaaccgcattgcgctgatggaggttccgatgatcctgcacccttcactggcctccgccgatccgctgcgctatgccgaggcgttgaccgctttacacgatgcgcctctcggctcgctgcatctggatatcgaagataccagtttcatcaataatattaccttcggtatgaaaaccattcaggcggtcgcacaatacactcgccatccgctctcatttcacctgatggtctcatcgccgcaacgctggttaccctggcttgcagctatccgccccggctggattttcattcatgccgaaagcgtgcaaaaccccccggagattctggcggatattcgcgctatcggggcgaaagcaggactggcgcttaacccggcaacgccgctattgccttatcgttatctggcattgcaactggatgcgctgatgatcatgaccagcgaacccgacggacgcggacagcaatttatcgccgcgatgtgtgaaaaagtgagccagggcagagagcatttccctgctgcggaatgctgggcggacggcggtattacacttcgcgccgcacggctgcttgccgccgcaggcgcacagcatctggtgattggccgggcgttattcacgacggcgaactatgatgtgacgttgtcacaattcaccgcgctataaaggagtcatatgctgatgagccaacagcgccccgaccgtatcaaacagatgttgcattacctttggcaacacaggcacctctcaacacagcaagctattgagctttttggctatgcagaggcaaccgtgcgccgggattttcactatattgccagccgttatcccggtatggttcgcggccatggttgtattgacttcgacgacagtacggaagataaagaatatgttttcgacgttaagcgaacgttacaaagcgaggcgaaacgcgaaatcgccgccctcgcccgcacgttcatcaaggatggagactgcttttttctcgactccggctccacctgtctggaactggcaaaatgtctggtcgacgccaaagtaaaagtcatttgcaatgacatcaaaatcgctaatgaactgggtggcttcccacacgtagagagttacattatcggcggactgattcgccccggttacttttcggtgggcgagagtctggcgctggagatgattaacgcctttgccgttgaacgcgcctttatctcctgcgatgcgctgtcgattgaaacgggcatcaccaacgctaccatgtttgaagtgggcgttaaaacgcgcattattcagcgctcacgcgaggtcatattgatggccgatcactcaaagtttgatactgtagaaccccatgcggtggcgacgctgtcctgtattactaccattcttagcgacagtgcgctcccgtctgctatcgcccgacgttatcagcaggcgggatgccgtctcatcatgtcagacccctcatcaggagcgcgttaatggacatcaggcaaatgaacagaacccatctggatcactggcgcggattgcgaaaacagctctggcctggtcacccggatgacgcccatctggcggacggcgaagaaattctgcaagccgatcatctggcatcatttattgcgatggcagacggggtggcgattggctttgcggatgcctcaatccgccacgattatgtcaatggctgtgacagttcgcccgtggttttccttgaaggtatttttgttctcccctcattccgtcaacgcggcgtagcgaaacaattgattgcagcggtgcaacgatggggaacgaataaagggtgtcgggaaatggcctccgatacctcgccggaaaatacaatttcccagaaagttcatcaggcgttaggatttgaggaaacagagcgcgtcattttctaccgaaagcgttgttgagggaaatcatacaggaaaaggtcgggtatagtacccgacctttatattactggggcagatctttttcagttaacaagcgtgtcgttttcacttgttcaatatttctggcgccacccaacatcatgttaattgtcagctctttgtttagctgttcaatcactgatgccacaccctgagcgccgccaagattaagaccgtataatacaggccggccaaccgccacaatatccgccccgctggctaacgctttgaatatgtgcgaaccacggcgtactccactgtcaaaaataacaggcactcgcttgttgacgacttttgcaatcgcaggaagcatatcgaatgaggacggcccgctgtctaattgacggccaccatggttagaaacccatattcctgcggccccggcctggatagcaatttcagcatcctccggcgactgaatgccttttacgataaccggcagaccggaaatacgatgtacataggcaatatcctccggcgtaaaggcttgtttagcctgcgcgtaaatttcacttatccctgctcctttgccagtttttgaaccatcgtcattttttctggcgaacatttccaggtttgcaaagcccaacgggaactggaagttatttttaatatcttcttcccgataaccaccgacaggcgaatctacggtcagaataatcgctttagcgccatgctttaccgcttgtgcaagaataaattcgttaaattgattattcttactcatataaagctggaagaagaacggatttttcccggaaacgttagccacctcttcgatggtcttgttgccataggtgctcaacgagaaaatcgaaccgacctgcgccatgcctttcgccgtcgccaactctccggaggcgtgggccaggccctgcgccgccatcggtgcctggattataggcgttttaagcggaatacccagtagctgcgttgataaatcgatctcttttaactcaatgccctgtaatacgcgcggcataatatattttttgtcaaagctttcggtgttgctgcgaaggttattctcatcttcggctccaccgcgaatataaccaaatgcccctttctccattttggcctgaacgcgcgcttccagggaggctacgttcgtcatttttattgctttttcgtccgtactggctttgtactcttcagcataagccaggcctgatgttgccaacattgccagcgaggccactacccgaatgaggtgatgagttttcatcattattccctttattgcttaaccgcttctgcctggatttttatatcgacaactttcgtcatccccatatcgaccagataatctatcccccactgggtgcgatctatttgcgtgacaaaatcaccaccgcaaacctgcgccttgaatatcgggctcatataacagccaaacttggtggtggttaaggtgacgggcttcgttactcccttcattgttagcaaaccgtcaatagaaaccggtttattatcttcaaaatgccattttgttgatttaaataccatttctggatatttttccgcatccagaatatcgctactgcggatatggttatcaaacgcatccaccccggtatttaaggcgcttacgggaatcgtcacacgcatctctgcgacttgcttttccggctgatatttcagttcgccgctaatagcataaaacccgccatgattggttgaggtctggaaatgatcgatattaaataccgcattggtatgcgtattatcaaatttatatacatctgcatgagcagcacttaataaacccagagacaggagagcaccaagaaaactctttttcattatattcactttatatcttaaataaggtgaagctatcttaatgtcccctgtacgcaggatcgagagggataaacaggaaggactgttgcaaaaatagaacgatgaaaaggccgtgtcacaaaaacagcagctcacgaatgagtttatgtcagggctatttccgcaacctgtaccgcctttgtggcggtacagaaggcaaactgactaacgcatgatacgatcgtcgacataacggcgcttatccggcgcgggcgggaaatactgatacagccaggtttcgctgatagcctccccctggcagcgcaggaacatacgcatatccaccggtgccgtagaatccgaggtcggataccagtcaaactggatacgataaccgtcgaaaggctcaacgtagaggatctcaatctgcttcgcctcaccgctggagagcgtaattaccggctcaatgccttttggcgcggccgctttcagatcgccgccgacaaaatcaatagcaaaacggcgcgcccatttatccgggtaatgttcgcccggcgcccaaccttcgggaaagccgcccatccctgtacgggtcgccatgacccgcgcaagcggcgattgtaccggcggctgcgcgctccagtacaaacgataattgaacgccagcgtatccccggctttgatcgctttttccggctgccagaaacagaccacattatccagagtttcgccagtggttgggatctccatcaggctaaccgcgcctttcccccacttattgcgcggctccacccacaggctcggacgtttgttgtaccaccccatcacatcctgataatgcgagaaatcgcgatcgagttgcagcaggccgaaccctttcgggttatcgtccatatatgcattgaactgcaatttctgcggattattcagcgggcggcaaatccactcgccgttaccccgccacatcgccagccgatcggaatcgtgaatttgtggatgaatggtgtcgcatacccggcgttcattattcccacagctaaacatactggtcatcggcgcaatgccaagttgcttaatatctttacgggcgtagagatggttttctacatccatgatcacctgcgatttttcgcaatgaatcacaaatttatacgcgcccgtcacgctggcgctgtccagcagagcgtaaacggtaaacgtagtatcgcccggcttcgcggtgtcaaaccagaatgcggtgaagtcagggaactcttcctgaccgtcagtataggtatctatcgccagcccgcgagccgacaggccatactgataagtatcatctaccgcccggaaataactggcgcccaggaaggagacgacatcgcgccgcgccagttccggcgctttaaagacacggaaaccggcgaaaccgagatcgctctgcccttccagttgcgtcgtatcgacgccggcatcgttgtatttaaacagttccgggcgaaaatgaatctcgcgagcaagatgcgtcgtcgtatcaacggaaaacatgcgtacgcgacgacgaaagcccatccctacgtggaaaaactgaatatcgagctgccggttggcaacaccgttccagagtgaatgcgccgcgtcatactgaatgctgttataggcctgcggcgtcagattggcgagcgtatccggcaagggtcccggcgcgccaccccagggctttttcgctaacgcctgggccattgattgcagaccagcaaaatcaaaacggacaattttaccatccgcaatatcggattccgcggcaaacgccgcctgagaaaagagggaagcaataccgctggaaccgcacacggcggccattgccattgaacctttaataaatcgtctacgattcatacctgaaaatgagtccttctggtcttgtgaatggtcccgcgctggttttttcagcagcaagaatgtgcccgtttctgaccgctcactctagacaaaattcattaataatccaattgttggtcgcctggaaactgtgcaaaagcgtaaatattttatgtcgataagaaccgaccgaatcggatgtaaacctcacgcagcattcttcaggttatgaaaagtttattccagactaacgtgatgtttcatgactcgtttaaacagcgccagacgcgcacgcataaagcggttttccactttaaaaccggcaagtttgttcagcccaatccgcaacagacgatctcgcccccgaatgctggcgggccagcgaaccgggccgtgcagcacgtcgcgcgtgcggctggcatgacgagcgaaattcacccagtaatccgccacctgcgaggcaaaggccaggtcattctcattcacataatggcatgtgggctcagcccgcgttaacgtatcgaatacatacggtatttcattgccatgacaggcaccattcgcgtaggtgttatgctccgcttcggcgacataatcaaaccagtaacgccagcacggttcgccgatccgctgctgcgcttgcatgacgacataacccaacgtggtaaataccatatcccgacagacctgccgccctagcgcttcgtcgcctttcactccaggataaagcagccggattaaccccaggccaacacgccgctcacggcgcattttttgaatttgaccggcaatatcgacgccaaaaacggccaatacgctggcttcatcgctattcgagccgatcatcaccggtatcggatgctgtttcgccgcaaagaaggtttccagcatcggatgcggcagcacgacgtcgccggaaatcggcgtcggcgcaattttaaaaggcgcgtccagcggccaaaacgtctctgccggtaaagcgcgtagctgttcggcagtggcatgggctaaaccaagatgttccgccagcgcaacgcctttttttagcgccacctcgcggggcgtatccggcagcgtataaccactctgaataatcgctttatgaaaaagccccttcgccaacggcgaagccatcaacgacagcacgctgcgggcgccggcggattcgccaaataacgtcacattctgcgtatcgccgccaaacgcggcaatattgtcctgcacccagcgcagcgcagcgatttgatcgagtaaagcaaaattatgaatacactccgcctcttcgccttccagcgccggatgcgcgaaaaagcccagatggccaagccgataattgaccgtcaccacgatcgcgccgcgcttcgccagcgcttgaccgtcatagggcggcaaactccccgcgccaatggtataaccgccgccgtgtagccagaccatgaccggcaacggttcatgacgcacggcgggagcccagacgttcagatagagacagtcttcggaaaaatttcccggatcgccgccgccgagttcgcgacaccaggtaatatcctgccaactggcgcaggagaaacaatccgcctggcgcacgtcgtgccagggcgtaacaggctgcggcgcacgccagcgtagctcccctgttggcggcgcggcataaggtataccgcgccagatatggatttcttcctgtacgacgcccacgattttaccgtgacgcgtctccaccaacgggatggagggattcaacataacgccttccttttacagtatcctcacagcctgtgaagcttaccgcttttaaagcagaccgcaacggcgtttactgcgttcttccgcttcctgatataacgaaaattcatcccgtactgcacatcccagcgcctgttcaaaggcgtcgcggctggcattgccgtggcttctggccagcgtttcatctcccaaattcgactgaaaaatgccggctgcgctgaccggaagaaaatcttcataggtaatcggctgcgcgattacccaaccgcgctcaataagcggctgcggatcgtcgccaggatggatcgcctgacgatgcgcctcgccggaaggcgttaagcgatagcggaaccaggcaagcccctgctggcgaagcagaaattcgctatccggaaaggcgttaaagacctcccgcaaatggagttgatgcgtgaagttatccttacccgttcccgccttgtgcaacagttcgtcatataatcgacgaccttttggcgtcagcgcgacgccacgttgctcaatttcgccgaagcgcgccgtgtgcgtaccctgcttttcatcaacgaagagcacctgctcttccagagctttgaaactggtttgccgcaacagaataggcacttcgcggcgaggcggaccttcgataagaattttaggcgtaatgccgcactccggcatcatggcctgtacccggtcgatatccagagtacgcggcgtcagatggttaatgtggcatcccggaaaacagaccacgtcggcaattaaacgatgctcacgatgcaggctgcggtacgtttcttcatcaacggtagcctgacgatgccagcgaaaagtctccagcgtttcacggacgaactcttcggcctgagcagcgctaaaaccgccctgctcgtcgtactcatccagcaattgtcggcagcgcgatgtaaaaatatcacgctgcgataagatttccgccgcccgctggcgtaatgccgcgttttcaatgagctccaggcgtaatagcgaagtgaacatgcgaaagggattacgcgagagcgaagcctcgtcaatgggacgaaatgccgtggagtgcacaggcacgcccgcctgagagagatcgtaataacttactgggtacatccccatgatggcgaatatccgacgcaaggtagaaagttcttctgcggtgccaacacgaatggcgccatgtcgttccacgttcaatcgcgccagttcatcggcattagccaactgctcatgcagtttgggattattttccagcaccgccagattcacgtcagccacaagttccagtaacgtaccgtactgcggaacttcctgctggtacattgccgacattgcctgcgaaaagtgttcccgaatctcatctgccgtgatggtgttcgccataatgtcatgcctccagtgaatgttacctggagtgtagaaaacctcatccattccggggagaagaatttataaagtgtgatccgacctgaattcattatgcagaacggattgacatgagctggcatatccccgaccagatcgcggcttaacacgcttaacggcagttgaatcatcagtaaaataaaacagttgtaacttgaaatggtaaaatgttaataatattttgctatcaggttatcaaaaacaaacaactttacttgtcacccgcacggctctgtttttaacatcgcttatggaaaaaaatggtctgtttagtcagcgcattcggttgcgccaccttcatacatttgtcgccgttgcgcaacagggaactctggggcgcgcggctgaaactcttaacctgagccagccagcgctttctaaaacgctgaacgaactggaacaactcaccggaacccgtctgtttgaacgcgggcgactgggcgcgcaattaacggttcctggcgaacaatttttgactcatgcggtaaaagtattagatgcattgaataccgccgggcaggcgctgaatcgcaaagaggacgctagcgccgatgtggtgcgtgttggcgcgctccccaccgctgcgctgggtatactcccggcggctattgggcggttccatcaacagcaaaaatcgacctcgttacaggtcgcgaccatgaacaatacgatgttgcttgcgggtcttaaatcaggcgagatcgatctgggtattggccgcatgtcagacccggaattaatgggcggtttaaattacgaactgctgtttttagaatcgcttaaattagtggtacgccccggtcatcccctgttacaggagacgatcacgctcagccgggttatggaatggccggtagtcgtctcgccaaaaggcacggtaccgcgccagaatgcggaagccctgttgcaaagccaggggtgtaaaatgcctgccggatgtatcgaaacgctatccgcatcgttatcacgacaactgaccgtagattacgattacgtctggttcgtcccctctggcgcggttaaagaagatcttcgccaggcgacgctggtctcattacccgtgccgacccagagcgcgggcgagccgataggtattcttacgcgagttgatatcccgctctcaaccggggcgcaaatgctgattgcggcgatccgtaaatcgatgccgctgtgatagcggctgtcggagaataaacgcgcccgcggctaaaatagcccgctggcgcgacgcttactaaaggaaggatgatcgcatcgtcgcgccagtatcatgtaaacgaaacgcatcaacggcttgcgtcaagcgggcagcctgttcttcaagcgaagctgccgccgcggacgcctcttcgaccagcgacgcgttttgttgcgtaaccctgtccatctcagaaatagcctgactgacctgaacaataccgcgactttgctcatcagaggctgccgcgatgtcgagcataatatcggtgacgcgtttgacggcatccacaatctcattcatggtgctccccgcagcgataacctcttcagatccttgttcaatcaggctgaccgatgcgccgatcaagccttcaatctcttttgccgcctgcgcgctgcgactggcgagggtacgaacctcactggcgaccaccgcaaaaccgcgtccttgttccccggcgcgtgccgcctcgaccgccgcgttcagcgccaggatgttggtctggaaagcgatactgttaatgacggcggtaatttccgagatttttttcgagctggtggaaatattccccatcgtttgtacgaccccggaaaccatctggcctccgcggctggctttaccggaagcatcttccgccagtttgctggcgtgatgcgcattatccgcattctgcttaacggttgccgtcaactgttccatactggccgcggtctgttcaatggcggcagcctgctgttcagtacgagaagataaatccgtattaccagcggtaatttcgctggtgcctcgataaatttcctccgccccctgacgcaccgcccctaccgtttgttgcaacgcatgctgcatctgctgaagatgatggctcaggcgaccaatttcactgcgtcctgtgggctcgtcagccatggtcagatcgccggccgcaatgcgttcgatacgtgacgcagactgctgcaagggttgtatcaccgtgcgacgcagcaccatgaaggtcattaacgtcaataccagcgccaacgtaaatgcgccaatcataaacatcataccgagccgggtacgttggtaagcctgctcgctaagtagtctcgcccgctcggtgcgcagttcaatcgctttcaacaggacatggttatatgcggcatccagttgttttgcctgctcgttttcatgattaatgatcgcttcgaacatgccatttttggcaaatttcagcatcggttgcaggccgttgatataggcggtgtagcgggcgtttaactcgttatctaacgcgtcatcggcgggtgttttcaccgctctggacatataagcgttaaagccgtcctgagactgcttgatccgcgtttccgcagcggcaatattggctttcatttcatccatttcagcaatccggctcgccgcgccagcgtggatcatattgatacgtgcggtacgtaagtggttagcgctgttggataatcccatccgtacctgaatctcgtccgtgacatcacgctgatcgcgatcggcctgtaacagaaaatagcctgccagcccggcgctcaaagcaaaaagaagaaggatgccaccgagaatggaggaaaacagcggaaccagccgaatatgatgcaggaagcccagtttatgcgaggcttgcatcgagaatgtgttgcccatgaccgtcgactctcttgtaggttttatgcgtaaaacacgcccgttagatagtcatcggcacttcgtgacgtttgcttatcgcgaaaagcatcgccttcgtcacattttcacaacattcattccagaaaattcagaaaagcgccagcggaaaatccgctggcggatgaatcagttatcgccaaagtggataacagtacggatggatttaccctgatgcatcagttcaaaggcatcgttaatctgctccagcggcaggcggtgagtaataaaaggatctaaacggattttaccgttcatcgcatcttcgaccatccctggcagctgcgtgcgccctttcacgccgccaaaggcggagccacgccagacgcgaccggtcactagctggaagggacgggttttgatttcctgccctgcccccgctacgccaataataatgctttcgccccagcctttatgacaacattccagcgctgctcgcatcacgttaacgttgccgatacattcaaaactgaaatctacgccgccatcagtaagctcaacaataacgtcctggatcggtttgtcgtaatcattcggattaataaagtccgtggcccccatttcgcccgccagcgtaaatttttccggattcgtgtcgacagctaaaatacgcccggctttagcctgaaccgcgccctgaataaccgccagcccaataccgcctaaaccaaaaacggcaacggtgtcgcccgctttcactttagcggtgttatggacggcgccaataccagtcgtcacgccacagcccaacagacacactttatccagcggcgcctgcgggttcactttcgccagagaaatttccgcgcaaacggtatattcgctgaacgtgctggttcccatatagtgataaacgggttcgccgttataagaaaagcgggtagtgccatccggcatcagcccttttccctgagtggcgcgtacggcctgacaaaggttagttttaccggacttacagaacttacactcgccgcattccgccgtatacagtggaataacatgatcgccgggtttcaggctggtgaccccctcgccgacctcgactaccacgccgccgccttcgtgacccaggactgccgggaatacgccttccggatcatcgccggaaagggtaaaagcatcggtatggcaaacgccggtatgagtgattttgaccagaacttcgccttttttcggcggcgcaacgtcaatctcgacaatttttaacggctgaccgggaccaaaagcaactgctgcacgtgatttcatatatctcttcctgttacggtgagggaaattgttattttagataagcgcgaagaagatggccgatttccgccatccgaaccgcgcgctgatctggcgtagtctccccgctgaccagctcatctttcagatggatttcaaccatttcactcatcaggccattagacgcgccgcgcacggcggcaatctgttgcagaatcgccagacaaggttcgccagactcaagcgcccgctccagcgcttcgacctgcccgcgtatgcgacgaacacgggtaaggatacgttttttatcttcaggtgaatgcggcattcgacctccatatactataggggggtatactatcagaattttatgtttatgtaattgtaaaattacgcacaatataaaaatcaatagcttatagatttccggcatagaccatcaagaatcagttcacattcagcatattcagctcatgggaactttttcaggccacagacaataaacaccaaagctttctttctaagctgcaatgttctgcccgactggggcacagaggtaatgccggtaaatccagtcccattacccagaagtaaatatttgcttaatagtttttatttactcaccaggtggtaatgaataaaggttatgatatgcagatgtcagtcttgtaagaacgtaacatcacaactgcgatacaccgccgacgggtagcgaaaatatctcaaccctgtgtctttccaggcttagtcaatgtggacaaaaaatcaaatgagcgttatttgaaagatttttaatacccaaaagcgtcatcattattgttagtttgaaatcaatctcaggtaataatccatgcctatttcgatttgtaaacatggtgctccttttgttgttcaacatgaaaatcggtacggttccggtgcaagtcagtcatcatcactttcaaaatcaatccgccatattagcaactctcatgaggaaataaaatttataagttgctatagtgcaaatggagcctgtttttccaatgcacagatgctagccaatgcctcagggaggcctgttataggttactatgggaaaataaataagttaacagccagtctggataatagcggtcgtatattccgcccacagcataagcttgcggccaatatttgttatgtaggtaatcggcttctgagcgctccagttcaacttgggtttggcctgaaacatctgctaacctgtcactcaaatggtaatgtcagataaagtgtcatgccatgtccttcccggcattgctattccacagcctacagatatgggcgctcagttctttcctcaatcgttgctatgggaagttctgccgtcatttcacgctcttgccaaccagcattttattaaagcctgacttttaccagagtaatttcataagagtgcccatcttctggtctaaaaataataaatctattgttatttttagtaaaggatttcgacaaaataaaactatcatgatatctggccaggacgtagtaccagcctccatcatacaatatcatttcgtattctttctttaattgtggtttatagatcccaacaaaaaaagaaaatataaaaaaatatataataaaaccaagcataactatagtgaaacaatgccttcgcacccaactgagttgcgtaaaacaaatcactggcatcaatttactataaaaacgcatccccaccgataagcataaagctaccagtaaaatgataaaaaaaagctcccacaaaaacgattctgttaagagagaaaactcgataacaattggaataaagaacaaaaccgctgccaaaaaaagacgtaaaaagctaatgtcgtggatacgtgctttttgctttactagaaaaaataatagaatacccactccccacgctattatgaatatagccatcaggctaatcgcatggaatagacttcgggcaatgttgtcagggccgacgcctacataccaccacgggaaaccatagtacgcggagacgccccagccataaaaataagcgcttccccatcccaaaccacctaaataggccaaaagcatcgaagagtttttaataattgaatcatcattcattatagttaactcacttaagaaatatttaatatgaaaatagaaatcaaaatgtcacataaaacactagcactttagcaataatagtcggatgataagtttgtctgtttttcctgagtatcaagccagctcatactcacgccagcacactaaaatcaggagtggcttcttttttagatctttgccttagccaggcgcacactcaataatgatagcagtcagataatatgtaccaggcattaacctcacgttgttgatgatatatttacttcgttgaaaaacaataaacattgtatgtattttattggcgacgaaaaactgttaaagaagcgtaattccatatacaccatttacctgattacttttcttgctaatatttgctaattaattatttgctaaagcgtgtttaataaagtaaggaggacactatgccattgagtgttggacagggttatttcacatcatctatcagttctgaaaaatttaatgcgataaaagaaagcgcacgccttccggaattaagtttatgggagaaaatcaaagcatatttctttaccacccaccatgcagaggcgctcgaatgtatctttaatctttaccaccatcaggaactgaatctaacaccggtacaggttcgcggagcctacatcaaacttcgagccttagcgtctcagggatgtaaagaacagtttattatagaatcacaggaacacgccgataagttgattattaaagatgataatggtgaaaatattttgtctattgaggttgaatgtcatccggaagcttttggtcttgcaaaagaaatcaataaatcacatcccaagcccaaaaatatttctttgggtgatattaccagactggtattttttggcgacagcttgtctgactccttagggcgtatgtttgaaaaaacacatcatatcttaccctcctatggtcaatactttggcggaaggtttactaatggatttacctggactgagtttttatcatctccacacttcttaggtaaagagatgcttaattttgctgaagggggaagtacatcggcaagctattcctgctttaattgcatcggtgactttgtatcaaatacggacagacaagtcgcatcttacaccccttctcaccaggacctggcgatatttttattgggggctaatgactatatgacactacacaaagataatgtaataatggtcgttgagcaacaaattgatgatattgaaaaaataatttccggtggagttaataatgttctggtcatggggattcccgatttgtctttaacaccttatggcaaacattctgatgaaaaaagaaagcttaaggatgaaagcatcgctcacaatgccctgttaaaaactaatgttgaagaattaaaagaaaaatacccccagcataaaatatgctattacgagactgccgatgcatttaaggtgataatggaggcggccagtaatattggttatgatacggaaaacccttatactcaccacggctatgtacatgttcccggggctaaagaccctcagctagatatatgtccgcaatacgtcttcaacgaccttgtccatccaacccaggaagtccatcattgttttgccataatgttagaaagttttatagctcatcattattccactgaataaagttccatcggctgcggtacgccttgagcaaaacacagctcaatatcatagtgccggtggcatgaaaatatgatgctatctttgctgccgattggtcaataagtgatacatagtctatgttcagtaagacaaaaatggatagagtcgataaatcgccaccgtaactaaaatactcactatcacactgacaataaagtatgttttgaatggctgcttttgcgttttatgacggaagagttgttgaccaacaatcgccccaggccacccaccgacaaccccaaacaccaacaaagtggattccggcactctgcgccaggttttacgtgccgccgttttgtctataccgtagatcgccagcgttagcacattggcgagcaggaaccacatcgcgacgggatgcgatgtaaaaatgcttccgaccgcagcgaagatcaggagtaaataacaaaagcggttaagatacatatcattatgtcatagcaataattaggggcatcggagcccattatacgcgatacatgcgcctatgtgatgtagaatttttttcactcagccaacgagtcattaaggattcatttttaattaccatggtaatcataaggtaattaacggctgtgaacacgattaaaatgggtaaagccaccgaaaatgttaccaccttaaccgttgccaggataacttaatgaagaaccctctttattgctgtttgttatccggttggcagtctcagttttggatttattaatcgtatttatatttattacataagatgtacgatgttaatttgagaattttatctcaacaaccgtatatattcagatatttctgaattaagattatcatcgattaaaacaagttaacgttttgataaacataacaacatcgtcagaaatcatgatttgttgtcgtttgttcatgagacaaataatttatatgcttgcaaatatagatagcacgcaaatcaacttagctcaaaaaatgtatttgacaagaaaagataagtctttatattggccctggatagagtggtaagatgataattagagacatgaaaggcaccgtcactgaagcatttatctgcttatcatgtaaatatgtatgcgtaaatggagcataaactatgtccagtatactaatgtctatggtatctttacattttcacctttcatggtgtcgctgcactcatatccagttgatatcttatggtatattcaatccattccctttgatgattcctgtcaaacctcctgattaaattagttaacagcgatggaatacataacgttaagtactttacgcctgcaaatgtcaggctcacgccctaatgcttaatttataatacgcattaccttactacaggaaatagatagcatgttatccaaaaaatttggcttatcgatgatagtgttgggaataatgtcgtcttcagcgtttgctgatagcatcgttgaagggagaacactcaatgtcgcagtatcaccagcctctccccctatgttatttaaaagtgctgatggcaaattgcaggggatagatctggagcttttttcgtcttactgtcagtcacggcattgtaagctaaacatcaccgaatatgcctgggatggaatgcttggcgcagtggcgagtggtcaggcagatgtagcattttcgggaatttcaatcacagataaacgtaagaaagttattgatttctctgaaccttattacatcaactctttttatctggtcagtatggccaatcataaaataacgctcaataacctcaatgaattaaataaatattctattggataccctcgaggaatggcttactccgaccttatcaaaaacgatctggagcccaaaggatactactcgttaagtaaagtaaaattgtatccaacctataatgagacgatggctgatctaaaaaatggcaatcttgatctggcttttatagaagagccggtttattttaccttcaaaaataagaaaaagatgccgatagaaagccgttatgttttcaagaatgttgatcagcttggcattgcctttaagaaaggctctcccgtgcgcgatgatttcaacttatggcttaaagagcaagggccacaaaaaatatctggcattgtcgatagctggatgaaatagtaagctatgtcatcaggtaatatgctggctatcttttatttcctattggaagggattggtaatacgctgcttgtaacatttacctgttttctctcagcgtttttgaccgggcttacagtcgccgtattacggcgactatcccctcttccactacagaagatactcgacgtactggtctttattcttcggggaattccaatacttattgctgtttttcttgtttattttggattgccatcgattggcatatatgtttcaccactggtggccatgaacctcagcgtcggcttaatcagcgggagttatcttgccgaggtgttcagaggggcgcttaaattagttgagccattcgaaataacggtagcgaaagtggcaggaatgcgtcaattacaggttataataaatattgaactgccacagatgttgcgattttctgtgcccggtattatcaatgagttttcttctgtattaaaagcgacgccctttgcttatactgtaggcatcgctgaaataacgaagcaggcaatgtcactgacagccatcacgctgaacgggttacagatttatactcttgccggggtattatatttcattatttataaagtatttactcttctggccggagtgtttgagaaaaaatatcgcatcagttgaaccataaaaatagaggtgatactcatggctttactgaaactaaaagagataagtaaggaatattcaggaaaaaaggttcttgatacggttagtctgaaaattcaatcgggagacatgaaagtagtcatggggccatcaggttgtggaaaaacgacgcttttacgctgtctgcttcgattagaagaacctgattatggcaatatttattttcacgggaaaaatatttacgacaaagaatttactattcttgagttcagaaaaaaagttggttgtgtcttccagaattacgctttgtatcgccatcttaacgtcatggataatattacccttgccctatgtaaagtgtttggcatgccgggacaactagcccgggagaaagccttacatgagctacaaaaacttgatatggcctcgcatagcgcgaaatacccttcgcaattatcgggcggccagcaacagcgcgtcgccctggcccgaacaatggtcaccgacccagaactcattatttttgatgagccgacgtctgcgcttgatccgctcatgactcgtgaagtcggaatgttgatcaagcaacttcacgacaatggcgtcactatattatgcgtcactcatgatattcgcctcgccagattactaagcgataacgtaacgtttcttaatcatggcaaaattcgtgcagaaggcgcttttaccgatcttgccttacgagaaacggatccagatatccactgtttttttagcgaggcacaacgatgatcgctggctggtctctcttctttaatgacctgactgaacaactgccacttgttgtggacggtattaaagaaacctgtaaacttgcgctgattgtttccatcaccggttttttgtggggaattattattttctttctgagcctgagccatcgccccgtggtaaaagccataactcgactgtacatggatttctttatcggtacgccactcattcttattctatttgttatctattatggtttacctcaatctggcattcacctgtcctcttttaccgtggcggttacaggttttaccttgaatgtcggcgcatataatgccgcgtacatgacaacggcctataacgcattgaataagtatgaaacggaggcagcagtcgttcaggggttgaacaaacggcaggtctttttgtggattatactgcctcaggtattgctgtcttccattccagccttaacgaatcaggtgattaataaccttaaagacagcaccatcgtttttcttatccaatatactgagtttttcgcgcgaattcaggaggttgctgcaaccagctttaaattcttccatgcttacctttttgccgccatagtgtatcttattggcgttacctttatcgtcggtttgacccggtttttagagcatagactgcttcgccattacggtcagggttactgagttgtactgcactattctgattaattcaccactgacattatcaaagttatttttatttagcgttgattaagattttaaccttcattattgcgttagatgtccattctggtctaagtcttactccattgaggatattatggcgctaccacaactatcaatatggcagcccggcgatgggttaagaaaaataaagtataaatatcatgtttgtctcattgtcatattctccgtccttatacggttgctgtttttaactgaccgctacctttggtgtgacgaagcgtccagcgtgctgattagtcgacatagcgtagataatctgctcttccatgccgcttttgacgtgcatcctccgctttattatctgttactgcatgactggatgatattatggggtgatagcattgcagcggtacgctctctcagtctactctttgggatcctgacagttgtgctggttatcgcgcttacgcgatggctggcaaatgaacgtacagccttattggcgggatggttcgccgccctgatgccgatggcagtccattacagtcaagaaacgcgcatgtacgcgttaatgggaatgctaacgctcgctgccgcgttagcattgatgatgtggataaaaacacccacccataatcgctatcttgtcgcgtatgctttacttatgacgttcagcttttacacccattatttcaccctatttacacttattgcccactggatcgcagtaacaatattatcctgccaaagccataaaacggcctgctaccttaaacttcctggctggtggtttgctaacctggcgattgctgtcgcttatctcccctggttgcccgtattgtttaatttactgactcatctggcgcagttgagagccggtaatgatatcggttggattccccccgtaacatggcgtgacctgcctgcgatgtactggcatttttttaccggaaacaacggacagggttttccgtcgttcattctgtggctggctgtaggaggttttatcggtactgtggggcgaatatctttatgcaacggagaatatgaaagatatcagctgatattattttgtaatctggtcatccctgtaatgctggtcttcatcatttcctggtggatgccgttatttatcgatcgttatttcttcttctcatcgctgagcattcctcccctgctcgcggtattacttacccgcgcaaaaaaagcggtttgtggcttctggtttatcttattcaccttattattcggctatggttcatatcataataaccctgagcacatagacgagtttaaaccactggtaaactatattaatacccgtcaccagcctaatgatgccgtggtagtcagtaaaatgttcgattatttaagttatgtgtattataataagcgagattatcgtacgtttctttatacaccgcctaacgcacacggaacatcaggcagaccgaatgcctatggctttggttcactgttttatgcgcaagccgatcagacatatattgatactctgacaacgctttcaaaaagttaccatcgtgtctggttggtaagcggcggtaactttagtcaggattaccccttgccgtcagaatggcaaaatatcgcaaaattcagaagtggtagatttcaggtacaattatttgtaataccaactcaacaggcgcgtcaaatgcaatgattaccgttttctatccagtgcagtgataaacagtactgccactgccagaccgcctaaaagtaaggtccagccaaacgcttcaaaaacctcaatcatatcgcctccaggtaggtgatattaaataaagatggctatctcagcgtaacatttaaaatatcaattaatgtgcaataatcgctttatgtgtttgaataaatattgttcttcctgcatttaattgcattgttattatcaaagggcttaatacgcgtacatcaacgattattaattatcagcttataataatatgactgttcaattcatttatcagctattattatcctctatattctttaagataaccgcttaattcataatatcgcctttattcgtcgcattaaattactcactcacctgattaatgcttgcctaacgattgcttcgttgttttaattccagcgcgaaattatttagtgagagaacaatgaagcatacacaacaatcaggcgcaaaagtctataacccattcacgcttagcttatatgactggtgggtactcaatatctcaaacaaatatgcctggaagtgtcctactgatacgcgactacttcctttcttcctgcatcacatgggcgagactcacctggatattggcgtaggtacaggttattacctgaaacatgcacctgcgactcatgccatttcgctgatggatttaaatccggatagcctgaaaatagccgccagccgagtgggtaatacgaaaatccgcgccacactacaacacgatgttttcgacacgttcccggcggactggcacgggcgcttcgattccgtttcgatgtactatcttctgcactgcttacctggtgagatgacaacaaaagcgaaggcaattaaaaatgccggtatggcgcttaaacccggcggcacactttttggcgccacgattctgggcaaagaggttcctcacaatgcttttggtaagaaattaatggctgtttataacaagaaaggaatattcagtaataccaatgattcagccgatacgttacgcagcgtgttggacgaacatttcgctaaggtgactttggagcaacatggcgccgttgcgctattttccgccactacgccacgctcatcgtaagtacaggcacttccgagcggtcggcagcgcgatcatgtgggtttaacccgttgattaaacattggattacggaatagtaattgcttattttatttgtcatacaaataagtataatacccgcttccgatgtagacccgtcctccttcgcctgcgtcacgggtcctggttagacgcaggcgttttctgtatggaatacgccatcccctctgatagatgccttgtttgccttaagcagttaaccccgcctgaagcaaacgtcatacaggacggtcagtcacgcttacgcggcatcatccgtaacagcgtattgtctttccagaaatagtgatgcatcaaagcagcgatggcatgaagtccaataacaaaatagcccagattcgccagcgtgacgtgccaggatttcagcatatctacgcgttcaaagttagcttcggcggcatggggcatagtaatgccaaatgcgacccagggattaccgcggttatacatcatgaccagaccaataacaggcagcgcgataaataacaggtaaatcaccagatgtcctaaatgcgccattccggtcatcatcggttttggacgaggaacaatgggcggcgtgggatatttcagccgaataaacaagcgtgccaccattaaaagcaaaatagtgataccacatgaaacgtgcgtcatattaaaccagggccgataactacgcggcgcaaaaccgcgcagctccatcgcggcgtaagccacaataaccagaaaaaagactaaccagtgaataccaatttgcaggccggaatacttattgcccatagcgcgtcctgaatgaaagccgtaaagcgacaacataaccagcttttataaataattcatcaaatttatgaaatggtggtcgcacttgcccgttcaccctcgcaaacgggcgatttttagcgtaaagctctctgtcctaacgcactgcgcagcgtagtatctgcctgcaatacctgccatgcgttttcaatatcgcgtgggatatcaacgtgaatgataaaatctttaccacgcggtccataccctgtttcatcgtcacgcaaacggggcagctcgccggcaatcagagacagataacgctccaccgtccagatgccctcttcaacattggcaaaacgtgtaccgtcattaaggtggcgcagtaccggaacaaaaccaggaaaactcagccagcgcggcgcatcggtgtcgtcgtttgtcacgcgccggaatgccgcgatagtgcgccgctgcatggtggggtcttgcacaacgatagccgtgttaatgttttctttcgcctgacggatcagtgcgcaggagaaacgggcattttcgccgcaattagttgaccgatcttccagccaaattttctcagccggaatatgccagaactggttcgcgatatccgcaaggatcgcggcttcagcgcgtccgcttgtgcgaatagtgtggtagcgcggatgccgggcaatcacggcgtacaaaaacggcgtcgaatgacctataccgccgctaatcagtaaaggaacgccttgcgctttggcgatgcgacaggccgcgtcgatagtggggatcaccgcattgcccgccaggacgacgcaatccgacgaataaggttgttcgccggaaaaatcattttgcgccagccactgtccgacggtattcaccgccagcaatgtttccgcagagagcgccggaaatggcgttgtattcataattcctcctttttgttccgaacttgtaccggatcgctttgaaagacgtcgtcgcctggctttttaggccgtaatctgatccatggcctgtaaaatacgcttatcggaaataggataaggcgtaccgagctgttgggcgaaataactgacacgcagttcttcaatcatccaacggatctctttaacatcatcatcttcgcgacgcgctggaggcaatttatttatccattgttgccacgcctgctggacgctttcgactttcagcatttgcgcccgatcgcggtgcggatcgacagccagtttctccagccgcttttcaattgcctgcagataacgcagcgtatcgccgagacgtttaaagccgttgccagtcacaaaaccacggtataccagaccgctcatctgcgccttgatatcggaaagccccaacgccatgctcatatccacccgccctttcagacgcttattgatattgaatacggtcgtcaggatccgctcgacctgcttcgcgatatccaccacagtatcattcagctcggcgcgtaccttttcgtgcagcgcggtgaaacctgcttcgctccacaccggtccgccgttggcatctatcagcttatctaccccgcaggcgatacagtcatcaatcaactccagtactttgccgtacgggttaaagtacagccccagcttggctttattcggcaatttctcatgcagatacttaatcggtgaaggaatattgagcaacaacagacggcgtaaaccgcaccacatcgcctgttgttgttccagcggattatcaaacaatttgatagcgacgctgtcacgctcatccactaacgccggccacgccttcactttataattaccgcgtttctgttcgtagctttccggcagctcgccgaaactccagatatgcagcccgctctgctcgatgccgtcatccgccaccgccgagagcgtctcctgcactttgcctttcagcgcatttttaagctcggcgagcgaacgcccttcctgcagtttcttgtttttgtcattcaccacgcgaaacgtgattttcagatgctcgggcacctgatcccaatgccagtcttcccgatcgaccgtgacgccggtcatccggcgcagttcacgctccagagcgtccagcagcggcagctccagcggcgttacgcgacctaaaaacgcttcagcatagtttggcgccggaacaaagttgcgacgtaccggttttggcaacgatttaatcagcgcaataactaattcacggcgcagccctgggatctgccattcaaaaccgctctcgtcaacctggttaagtagcggcaacggaatatggacggtcacgccgtcagcatccgcgcccggttcaaactgatagctcaaacgcagcttaagattgccctggtgccagaagttcgggtaatccagtttgctgattttttccgcgccttctttaatcagcatacttttttcaaagttgagcagatccggcgtctcgcggctgatttttttccaccaactatcaaagtggcgggcggaaataacgtcatggctaatacgctggtcataaaactcaaacagggtatcgtcatccaccaggatatcgcggcggcgagatttgtgctcaagttcctcgacttccgcacgcaattttagattctcacggaagaaggcgtgacgggtttgccagtccccctccaccagcgcatggcggataaacaactcgcgacacaacgccgggtcaatctggctgtaattcactttgcgcgcggcgacaatcggcagaccgtagacagtaaccttttccgtcgccatcaccgcgccttgcgcccgctcccagtgcggttcgctatatgaacgtttaatcaggtgctgggctaccggttccacccattctggctcaatgcgggcagcgatgcgcccccacaggcggctggtctccaccagttctgcgaccattgtccatttcggcggttttttgaataaaccggaaccggggaaaatagagaatcgggcgttacgcgcgccggtgtactcttgtttatcggcatctttcatcccgatatgcgacaacagtcccgttaacaacgcaacgtgaatttcccggtactctgcgggttcgctgtttaccggaatccccagttcttttaccacctgacgcagttgggtatagatatcctgccactcacgcacgcgtaaatagttcagatagtcggtgcgacacagacggcggaattgattcgacgacagggccttttgttgctcgccgaggtaattccacaggttaacaaacgccagaaaatcggattccttatcatggaaacgccggtgtttctcatcggaagcctgctgcttatccactgggcgctcgcgcggatcctgaatagagagtgcggaagtaatgatcatcgcttcgcgcacacagccatgtttttgcgcttccagaaccatacgcgccaggcgcgggtcgaccggcaactgggataattgtcggcccagtggcgtcagcttatatgccgtttgctgttcgtcggcggtaatcgcccccagctcttccaacaaacgcacgccatcctgaatattgcgcttatccggcgcttcgacaaacgggaaggcggcaatgtcacccagccccagggcggtcatctgcaaaataaccgacgccaggttggtacgtagaatttccgggtcggtaaattccggacgtgacaaaaagtcatcttccgaatacagacgaatgcaaatcccttccgatacgcgcccgcaacgccctttacgctggttggcggaagcctgtgagatcggttcaatcggcaggcgctgcactttagtgcggtagctgtagcggctgatgcgcgcagtgccaggatcgatcacatacttgatacccggcaccgtcagcgaggtttccgccacgttagtcgccagcacgatacggcgtccgctgtgcgactggaaaacgcggttctgttcgctgttcgacaagcgtgcatacagcggcaacacttcggtatgccgtaagttcagcttgttcagggcgtcggcggtatcgcggatttcccgctctccgctcataaaaatcagaatatcgccgggactttcacgccccagttcatcgacagcatcgaaaattgcctgtagctgatcgcgttcagtgtcgtcagcctcttccacaatggggcgataacgaacttctacgggatacgttcggccagagacttcgataatcggcgcgttattaaagtggcgcgagaagcgttccgggtcgatggtcgcagaggtaataatcactttcagatcggggcgacgcggcagaagttctttcagatagccgagcaagaagtcaatattcaggctgcgttcatgcgcttcatcaataatgagggtgtcatactgcatcaatagcctgtcctgctggatttccgccagcaggataccgtccgtcatcagtttgaccatggtgttgctactgacatgatcgctgaaacgaactttatagccgatgcagccgccaggctccgtttgcaactcttcggcaatgcggttagcgacggtgcgcgccgccagacgacgcggttgagtatgtccaataagtcctttaattccgcttcccagttccatacaaattttcggcaactgggtggttttaccggaaccggtttcccctgccacgatcaccacctgatgatcgcggatcgcttccagaatgtcctgtttcttctggctaacaggcaaattttgcggataagtgattgaggggcgcgccgcttcgcggagggcgacctgcgccgcagcctgttcaatttctttcgccatcgtctggaaaatggcctgttgcgcatcaggattttttactttctttacgccatgcaggcggcgcgcaaagcgctgtttgtcgcgcagcatcagtgcatccagccgctgctgtaacacctgaagcgtcaacgtagattgttcagtcataaagctcttgggcaggattctgcctgtttaaaatcgttttaaatgataggtatagagtaccacattggggctttttttgcgttgttcaataatttcgaacaaagggttcgatatattgcgctatccctgcgacatatttgtgaataaagtgtcaacaagcaacggggcacgccccttcaaacacataaaaggaaacacccatgagcaaggtattagttcttaaatccagtattctggcagggtactctcagtctggtcagttgactgactattttattgaacaatggcgcgaaaaacacgtcgcagatgaaattactgtccgcgatctggcggccaaccctgttccggtgctggatggcgagctggtgggcgcgatgcgtccgggcgatgcgcctttaacgccacgtcagcaggacgctctggcgctgtctgatgaactcattgctgaactgaaagcccacgacgtcatcgttattgcggcgccgatgtacaatttcaatatcccgacgcagctgaaaaactactttgatctgattgcccgcgccggtatcactttccgctataccgaaaaaggcccggaaggtctggtaaccggtaaacgcgcggtggttctctccagccgcggcggtatccataaagacaccccgacggatttgattgcgccttacctgaaagtgttccttggttttatcggtatcaccgacgtgaattttgtctttgccgaaggcatcgcctacgggccggaagtggcagctaaagcccaggccgatgcaaaagccgcgattgacagcgtcgtggccgcttaaatatttttgcctcccgtttcgacgggaggtgacttcttaggtttgtagcgcaaatatcctaccacgccgctactgccgccatcgctgggatgcgttaccccatcattgacttcaacgcaggcgaaatcaaaaggcgacatattttcgatgcacgccacattgaccccatattgatcgggattggatcgacgctgatgaaaagtatatatcccgcataccgaacagaaaaaatgcaccgccttgcccgtattgaagcgatattcggtaagcttatcctgcccttttagcactttaatacccgacagcggcgcagacactgccaccgctccgcgcatcctgcaaaaggaacagttgcagcgcctggcggtatgaaagccatcgctaagttgaacggtaaacacgacgctgccacaatggcaggcagcagataatttttcagacgtcatacctggttactctcgcgaatagtgataccagccaacagtatagaaatagccttccggttcgcctaatgtaaatacgaccttcgtattcagaaattacccatataaaaatgcattttgcggtaaaaaaattgtcgggaagcggttatttacgcatccatttgccattaattccctggacatattctcccggcctggcgcgctcaaccagtttttgccctgccatcttcgccacctcgtccacgggaagatgattgctatccgctaactgctgataactggcgcggcgggcatgattaatatcaagcaccagtttctgggtttcggcatcattctttaaggccaccagatagccattcagcgtttccccgacccggccctgcgtgcgcgcttcgtccagggttaaggcccacacagaaggtgtgagcaagctcagcgtcagcacccatagtattaaatactttttcattatggcctcagaatagatcgctgcgtgatttcaggagttcttcaacgtctttatcgactttgatatgtatttcatgctcgatctttacattcatgttgatggtaatcggctgttccggcgcggcgacttcaatacgtggcgtgcaccccaccacgataaatgacgcaagcgctgacagcatggcaatactcattttcattatttatcctcacagtccttgtctttccggcaaggaggttgcggcaacgctgtattttgttcaagccatgcctgtaaattgtcgccaaaacgcaaactgcgccacagcgtaaacacattttcttcatgggtatagttcaagttaacgatcgcggttttaccatctacccggcttttgccggtaatagccgcctgcatcgttagtacgcccaggttatcaacgttaattttcgtccacgaatgcgtaatctccatataacgtagccagttgatcgccgagcctgccgtgacattatccttcaccaccgcatccgcagtatctttatcgatacgcaacgtcattggcccaggattcgtaagccagccatctttgattatccatttttcattgttcagccacagcggcagcgcgccgctgaccggaccagacatggcgaattgctttggatttatggcgctaatcaattcgctggatgaaatattttgcacccgcaaaagcgccgggtcgtgctgcggcattcgcaactgtttcataatgatttgaccgcccagcacgtctacgctgacatcgcttagcagtaatggattcgactcgctccagggataaccgccctgtaaatcagcggtgatatttttcgccgtgacctggttaactatcccggcgatacgcagcgagatgggcccgcgcgtccccaattgccacgcgccgttgtggaagcgaaatggcagaatgaaatcgacgccgttgattttgttatcaggcatccaggcgctgccgccttttaacacgccgtgtccacctgcttcaaatccctgcccctgcgcagcggaaaaagccacctgcgcatacagtgagccttcgcgcagcgtcattttccagtccggtggaagcaacggctggaaaacgataagcgactgcttcggccaccaggcctgtccacgaaggcgttcgccatcccagcgcccattcagccgtaccggccctatcgcccccgcccgaaggtcgcctttaaactggaacagggttggctctcgcccttcaacgctaaaattaagggtagaaggcggcagcacgctcccactggtaaatacggttttccccgccaccagagacagcgcgccctgtagcgacggcgttgtggcgtcgcgaacccagacaataggtttattcagcgccagtcttggcgatgtgacggtcattgcgccatagtgcaactgatcaaaaccggtggacaaactggtcaacctgatggtgttatcatgccattcgccctgtccggcaatatcccagtgggcgcgcattggcgtaaagcttccttgcccccaatagcgccaccgccagcgaccagcatcagggagaaaatcattggccaggccatcaagatgaagaacgaaatcgcccatctcattttcgtgcgcccgtaaaatagcctgtaatcggccatcaacgccgcgcggcgtcaccttaacgcccgccagcggccaacgaatttcatcaatatctaacgcatcaatcacccgcccgcgcgagcgtagcaatgcgccaggtgcaaaggtgagctgcggatcggccagactgccgcggaacatagcgggcaatacggcataaaagattaaatccttctgtttagcctcgccggtaagctgtagaggcatctcactgctatccatgctgagttttcccgggccgatagtcagtacagcgttcgctttaccggcatcgccctgggtcagaatattcaggcgtccactgacttgcgcattatccggcccggcttgccagttatcgatattaaaagccagacgtccgctcaaggggaatccctgatatggccagttccagcggccatcgctgatggtaagccgctgacgcgttaccgcccaggggagatcgagaatcgggtcaggattacctcgcgccatcacgatgagctgtccggcgttatcacgccactccagttccgcatccaccagcgacggttcctgcggcagacgcaaggtcgctgccgcatgaccgctgaccggcaggccatccggtaccagcggcaacacaaattcccccgccaggctaacgggaggctggttggccagcgcggcgatctccagttggctcaccgtcaatgcctgaccgcgtagctgcccttgaaattttactttttcgccctgataacgtatctgctgaatgaccggcgtcatggagatcgccagcttgccctgccattccggccagggcgcgagaatgacattatcgatgttaatccaggtattgggcagcattgactgccactgcgccagcgtacgcggcgcggcgggagaagcttccgtagcgggcagtttcgccaggcacgcggcatccagtttaaggcttttaatattcagcaaccaacggctgggatgcgtcagttccgcctgggtaatatgcgctaacgaacaatcattgaccagatagcgaagatcgggaatcactaacccatgacgtgtcaggcgtggactttgttccagagcgatacgggtaccgacgggtagccaaattcccgccagagtgggaacccacagcccgagggtcatcagtagcgtcagagggataagaatcagcagtaacagtagcgcaagggcggctttatatttacccttcatgggccattaatttcctgatttaacgaaaaattcagtcggctatctctttattttggcatgattgcccgtacatagcctaatagttcatgttgcaggggcgccctccggctatttgaggcgttgtggagaatgataacctaaaattattcattatatgtatgactatcaattatttttgattttttgtaagataattttaagcatatttgtgtgattcaaacatcactggagaaggtcatatgaaactcgccgtctatagtaccaaacagtatgacaagaaatatctacagcaagtgaacgaagcgttcggttttgaactggagttttttgattttctgctaaccgagaaaacggcgaaaaccgccaatggatgtgaagcagtttgtatcttcgtgaatgacgacgggagccgaccggtactggaagagctgaaaaaacacggcgtgaaatacatcgcgctgcgttgcgccggatttaataatgtcgacctggatgccgctaaagagctcggtttgcaggtggtccgcgtgccggcttattctccggaagccgtcgctgaacatgcgattggcatgatgatgacattgaaccgccgtattcaccgcgcttatcaacgcacccgcgacgctaacttttcccttgaggggctgaccggctttaccatgcacggaaagaccgctggcgtcatcggtaccggtaaaatcggcgtcgccgcgctgcgtatcctgaaaggctttggaatgcgtttactggcgtttgatccctatcccagcaccgccgcgcttgacctcggcgtcgagtatgtggatctgcaaacgttgtttgccgaatcggatgtcatttccctgcactgcccgctcacgccggaaaactaccatttgctgaaccatgcggcattcgatcaaatgaaaaatggcgttatggtcattaataccagtcgtggcgcgctgattgattcccaggcggctatcgaagctctgaagaatcagaaaatcggctcgctggggatggatgtgtatgaaaacgaacgcgacctgttctttgaagataagtcaaacgatgttatccaggatgatgttttccgccgtctgtcggcctgccataacgtactgtttacggggcaccaggcattcctgaccgcagaagcgctgatcagcatctctgaaaccacgttacaaaacttaagccagcttgagaagggcgaagcctgcccgaacgcgctgttctaatcctgtcgctcccctgcgctcaggggagcattttcggataacccctgaagatctatccggtcatatcattactatagtcagtgttaactatcagattacagagaatatcaatgaagaaaatcgtcacgctggtcgccctgagcatcataatgacagggtgtgtgagcagtggaaaagtgtccgtcaaacgcgagcaactggagcaccaccgctttgttctggaaagcgtaaacggtaaaacggtcaccggcccggagctcagctttggcgaggacatgacggtatccggcaaaatgtgcaatcaattcaccggcgaaggaaaactgtcggacggcgaattaaaagtgaaaaatttagcgatgacccgaatgatgtgcgcagatccacagcttaacgcgctggacggcaccctcagcgagctcttcagcaagggcgcgcaggtcgatttaaccgcgaaccaattaacgctggcgacggcagaaacaacgctaatgtataaactggcggatttagcgcactaagccattaagtgaaaagttatacgcgtcaggcgaaacgccgcgcttaataactcccgcagcttccggcggcaagcgactgttcgctacaacgtttgccgttgggtagcgcgcacataccaattactgaaccatcaagctgccgggccgctgaaagcgaaccgccaatcatagcgcaattcgcttcgccggcgctggacatcgccgctttcatccctggcgaaacatgtgccgcggttgcctgctgaacaggttcgctactgcaagccgacaataataacgcggcacatcccacccaaaacgctgcgcgcatttctctcccctctgtttattcatccaaacgacaccgccctaaataataggcagcagaaactgacgcgtcgagaggcaaagcgcgcatttatgcgcttcattaacatttattggcaattttttacgtcttttcggcaagaaatcgccattctcctcccgccagggacacaaaagcgaaaatggggcttgaagggctttgctaaaataaaaggataactacaggatgcgctcacgattatgcgtgtccctcttttttgcgcaatgtaagggtgtcatatgcaaacaattgacggtaatggcgcagtagcgtcggtggcgttccgtaccagcgaggttatcgccatttacccgattacgcccagttcaacaatggctgaacaagcggatgcctgggccggcaatgggcttaaaaatgtctggggcgatacgccgcgtgtggtagagatgcagtcggaaggcggcgcgatcgccgccgttcacggtgcgttacaaaccggttcgctttctacgtcatttacatcatcgcaggggctgctgctgatgattccaacgctgtataaactggcggggcagctcacgccgtttgtactgcacgttgccgcgcgcactgtcgccacacacgcgctttctatttttggcgaccattccgatgtgatggcggtccgccagacaggctgcgcgatgttatgcgccgccagcgttcaggaagcgcaggattttgcgctgatcgcacacagggctacgctgaaaagccgcgttccgtttattcatttttttgatggcttccgtacatcgcatgaaatcaacaaaattataccgctaacgaatgaaaccattctgaacctgatgccgcaggcggagatcgacgctcaccgcgcccgcgcgctgaatccggaacatccggtgattcgtggaacttcagcgaatccggacacctacttccagtctcgcgaagcgaccaacccgtggtacaacgccgtttatgatcatgttgaagaggcgatgaaggcatttggcgacgctacgggccgtcagtaccagccatttgaatattatggccatccccaggctgaacgcgtcatcataatgatgggctccgccctcggcacctgcgaagaggtcgtggacgagctactgatacgcggagaaaaggtcggcgttctgaaagtccgtctgttccgccccttctccgccaaacatttgttacaggcattaccggaaaccgttcgcgctatcgccgtgctggatcgcaccaaagagcctggcgcccaggccgagccgctttatctggacgtgatgaccgcactggcggaggcctttaataatggcgagcgcgaaacgttgccgcgcaccattggcggccgttatgggctatcatccaaagagttcggcccggcgtgcgtactggcggtctttaatgaactcagccgtgcgaaacccaagccacggtttacggtgggcatttatgatgacgttactaacctctcgctgccattaccggaaaataccctgcccggcagcgctaaacttgaagcgttattttacggtctgggaagcgacggcagcgtatccgccacgaaaaataatattaaaattatcggtaattctacaccgtggtatgcgcaaggttatttcgtttatgactctaaaaaagctggcgggctcacggtatcgcacctgcgcgtcagcgagaaacccattcgttccgcttacttaattgctcaggcggattttgtcggctgccaccaattacagtttatcgataaatatcagatggcggagcgtctaaagcccggcggtatctttctgcttaatacgccgtacagcgccgacgaggtctggtcgcgtctgccgcaagaagttcaggcggtgttgaatcagaaaaaggcgcgtttttacgtggttaacgcggcgaaaatcgcccgcgaatgtggacttggcgcccgcatcaataccgtcatgcaaatggctttcttccacctgacgcatattcttccgggcgatagcgccctggttgagctgcagggcgcgattgccaaaagctatagcagcaaaggacaggatctggttgagcgtaactggcaggcattggctctggcgcaggaatcgctggcggaagtgccgttgcaggcggttaatccgcatagcgcgcatcgcccgccggtcgtctccgacgccgcgccggatttcgtgaaaaccgttaccgccgccatgttggcgggcctcggcgacgcactgcctgtttccgccctgccgccggacggaacatggccaatgggcaccacccgctgggaaaaacgcaatatcgccgaagagattcctgtctggaaagaggaactgtgtacacaatgtaatcactgcgtcgctgcctgccctcactcggcaattcgtgcgaaagtcgtttccccgcaggcgatggagaacgcgccagccagtctgcattcgctggacgtgaagtcccgcgatatgcgcggccagaaatatgtgctgcaggtcgcgccggaagactgtactggctgtaatttatgcgtagaggtctgcccggctaaagatcggcaagatccacagattaaggcgattaacatgatgtcacgccttgagcatgtggaagaagagaaagtgaattatgacttcttcctcgacttaccggaaatcgaacgcagcaaactggaacgaattgatatccgcacatcgcagctcattacgccgctgtttgaatattccggcgcctgttccggctgcggcgaaacgccgtatattaaactgctgactcagttatatggcgacagaatgttaatcgctaacgccacggggtgttcctctatttacggcggtaacttaccctcaacgccttataccaccgatgccaacggacgcggcccggcatgggcgaattcgttatttgaagataacgcggaatttggtctcggtttccgtctgagcgtggatcagcaccgggcgcgcgtcatgcgtttactggcgcaattcgccgatcgcatcccggcggaattaaacgatgcgctgcatgccgaagcaacgcctgacgttcggcgtgagcaggtcgccgcattacgccaacatctgaaatcggttgcgggcgcagaggaactgttaaaggatgctgatgcgctggtagaaaaatcaatctggctgattggcggcgatggttgggcatacgacatcggctttggcggtttagaccatgtgttaagcctgacggagaatgtcaatattctggttctggatacgcagtgttactccaatactggcggccaggcgtcgaaggcgacgccgcttggcgccgtcactaagtttggcgaacatggcaagcgtaaagcccgtaaagatcttggtgtcagcatgatgatgtatggtcatgtttatgtcgcgcaaatctcgctgggcgcgcagttaaaccagacggtgaaagccatccaggaggccgaagcctggccaggaccgtcgctgatcattgcctatagcccctgtgaagaacatggctacgatctggcgctaagccatgaccagatgcgccagttaacggcgaccggtttctggccgttataccgctttgatccccgccgtgcggatgaaggcaagccgccgctggctctggactctcggccaccgtctgatgccctggcggaaacgttgcttaatgaacagcgtttccgtcgcctgaatgcgcaacagcctgaagtagctgaacaattatggcgagatgccgcattggatttgcaaaaacgctatgactttcttgccttgctggcaggaaaagcggaaaaacccggcgcagattaaaaaatattctaaggattaacctggaaacaaaaaaagcccgaacatccgttcgggcttgtcaatttatacgctggaaagcaaaggttaacgcaatggcccagcgacaaaatgaatatgtgacaataaaggcatataacaggcgtagaatatcgtaaccgaatgatattgtataatttttattttgtataatacccccaaaagcattcgtataaattatatctatttcactgcgaattatttcattaattattgaattaaacggtaacatctctttttaggtctttcctgacaaggcagaaataacgttttaacgtcaactcgctgattatttacgtggaatacgcgtaatattacgtcgccctcccctgtaggtagtccccgcagagtatcgtggagcagcacctaaaatgtgacgtatgtcattgtacataaagtgcctttagggagtagaatttcagtggatacttaaacaggaggttttatgaacagaacgattcttgtacccatcgatatttcagattcagaattaactcaacgcgtgatttcgcatgttgaagctgaagcaaagattgacgacgctaaagtgcactttttgactgtaatcccgtctttgccctattacgcttcactgggactggcttattcagcagagcttcccgcaatggacgatttgaaagccgaagccaaatctcaactggaagcgattatcaagaaattcaaccttcccgcggaccgcgtgcaggcgcacgttgcagaaggctctcctaaagataagattctggaaatggcaaaaaaattaccggccgatatggtgattatcgcctcgcatcgcccggatattactacctatctgttgggttccaacgccgcagccgttgtgcgtcatgcggaatgctccgtactggtggtacgctaaatacccgagcccgcataagagagtgcgggctcaaatcaatcatcatcgcctagtgactgacactttttgaaaacagattgattacgattacgccgcagatgataagcaacatgccaataatagccggcacatccagtttttggccaagaaacaaccatcctatcaatccaataagaacaatccctaccccagaccaaatggcataaatgatacccgcagggatggttcgcattgggatggtaagacaccagaacgcaatacaatatccgatgatagtaacgaggctcggtaccagacgcgtaaaactatctgataattttaatgagatcgtggcgataacttctaccacgatggcgataaatagaaagattacagcttctttagtcatacatctcttcgttccaatatttttcgggtcgtgatgatatcttaagtaatacggatgacagaataaagacgcttttgaaccattgcatatcttgccataaaaacgtgctggcattcgtcgccgtaatccgtaccatacgcgacatacttttgcctgctggctgttgacggcaggagcgaacccggcatttatcgccagccaaatggggcatgaaactgcgcagatggtgtatgaaatttacggtatgtggattgatgacatgaacgacgaacaagtagcgatgttgaatgcgcggttatcgtaattgcaaagtttgcccccaatttgccccatttagtaccagagaactgaaataatgcaagaaattcaaaagaatacaaagaaagagcaatacaacctcaacaagttgcaaaagcgcctgcgccgtaacgttggcgaagcgattgccgattttaatatgattgaagaaggcgatcgcattatggtttgcctttctggcggcaaagatagctatacgatgctggaaattttacgtaatttgcagcaaagcgccccgatcaatttttcactggtcgccgtcaacctcgatcaaaagcagccaggtttcccggaacatatcctgccagcctaccttgagcagctgggcgtagaatataaaatcgtcgaagaaaacacctacggcattgtgaaagagaagattccggaaggaaaaaccacctgctcgctgtgctcgcgtttgcgtcggggtatcctgtatcgtacggcgactgaactgggcgcgaccaaaatcgccctgggccaccaccgcgacgatattctgcaaaccctgtttctgaatatgttctatggcggaaaaatgaaagggatgccgccgaagctgatgagcgatgacggcaaacatatcgtgatccgcccgctggcttactgccgcgagaaagatattatccgttttgctgaggccaaagccttccctatcattccttgtaatctgtgcggttcgcaaccaaacctgcaacgccaggtgattgccgacatgctacgcgactgggataagcgctatcctggacggatcgagacgatgtttagcgccatgcagaatgtcgtgccgtctcacctttgtgacactaacctgttcgatttcaaaggaatcactcacggttccgaggtcgtcgacggcggcgatttagcgttcgatcgtgaagagattcccttgcagcccgctggctggcagccggaagaagatgacaccgccttagaggcgttgcggcttgatgttatcgaagtgaaataatctgcaggcgtctcagcactccgctgagacgccatgctatcgatcattttaatagccgtacccggcatgacttgcctttgatcttcccgttttgcaactgcttccaggctttttgcgctactgcttgacgtacggcgacgtaaacgtgcattggatgcacgttaattttgccaatatccgccccgtctaatccaatatcgccggtcagcgcgcccaaaatatctcccggacgcattttcgcttttttgccgccgtcaatgcatagggtagccatctctgcggccagagggagtaacggctgccgggcgggcgcattcagccagttcagcttgagttgcagcatttctgaaagaatattcgcccgctgcgcctcttccggcgcgcagaaactgatcgccaggccgctgcttcccgcgcgcgccgtacggccaatacgatggacatgcacctccgggtcccaggccagttcatagttaaccaccagttcgagcgatttaatgtctaaccctcgcgcggcaacgtcggtggcaaccagaatgcgcgcgctgccatttgcaaaacgcaccaacgtctggtcgcggtcgcgttgttccagatcgccgtggagcgccaacgcgctttgtcctaccgcattaagcgcatcacaaacggcctgacaatcttttttggtattgcaaaataccacgcaggacgctggctgatgctggctaagcaacgtttgtagcagcgaaattttttcatgcgcagacgtttcgaagaactgttgttcgatagccggtagcgcatctaccgtatcgatttcaatacgtattggctgctgctgtacacgaccgctaatcgccgcgatggcctcaggccaggttgctgaaaacaataacgtctggcgcgtcgcaggcgcaaagcggatcacctcatcaatggcgtcactgaatcccatgtccagcattcggtctgcttcatccattaccagaatatgcagcgcatccagcgatacggtttctttttgtaaatgatccagcaggcgccccggcgtcgcgacaatgatatgcggagcgtgctgaagcgagtcgcgctgtgcgccaaagggttgcccgccacacaaggtcagaattttggtatttggcagaaaacgggccaggcgacgtaactctccggcaacctgatccgccagctcccgcgtcgggcacagcactaatgcctgtgtctggaacagagtgacgtcaattcgatgcaagagcccaagaccaaacgccgccgttttgccgctaccggtcctggcctgcacacgcacatcattacccgccagaatgacgggtaatgctgcggcctgaacaggcgtcatctcaagatagcccagctcagtaaggttattgagctgggcggcgggcaaaacattcagggttgaaaaagtggtcacaatttactctcgcggtaacgactcatagtcagcaggcgcgtatcctcgcagatccgggcgtttgatgcgacattttaatcggttcttcgtccggcggcgggtcgggcatcggctgaggacggggaagcggctcaggaatgggaacagggtcagtgggaatcgggtccgacaaggacgagtgtagatataataaggtcaaaagacagctcatattaccctccagaatgtcattcagactcttaaagggtagacgcagatagtctacaggcaaaaaaaagccgactaatctaagtcggcgtcgtacgaatcaattgtgctatgcagtaattcaaaaaaggaagtaagacaatatggagcgcaacgcccatcgcttgacgttgcattcacctgcgagagagatattgccccgaataggtagatggtttattgacttcgctcaaatttctcggcgttttttcacccgaaatggtctgaaaagcgcttttgttacaaccatttactgcgatgcaaccataaagtaacaccaccgatcaggacaactaacagaatacaaaacagagaaaagccgaaccgccatccgccgccgggaataccgcccaggttaacgccaaataaccccgttaagaaggtgctgggcagaaaaaccatcgccataagcgacatggtataagttctgcgcgccagagactcctgcatcacctgggcaatttcatccgccatgatgccagtacgcgcgatacaagcgtcaatttcatccaacccccttcccagcctgtcggcgatatcctgcattctgcgccggtgatcgtcgctcatccacggcagccgttcactcgcaagccgggcatagacgtcgcgctgcggcgccatatagcggcgcataacaattagctgtttacgtagcaatgcgaggaaaccgcgcggtgggatttgctggtcgagaagattatcttccagatcgataattttatcgtgtagctcttcaataaattcactggcgtgatcggttaacgcatcgcacacatccactaaccagccgccgcaatctacgggcccggtgccctcctgcaaatcactgaccacatcgtccagcgccagaacctttcgctgacgggtagacacaatgaatcgctcgtccatatataaacgcattgccactaattgatccgggcgttcgtcagtactgccattaatacagcgcagcgtaatgagcgtcccttcccccatacgacttacgcgcgggcgcgagctttcaccagccagcgcatcacgcacgttattggggagtaaaggcgttgaagccaaccagcgggcgctgtccgggtgggtataattaagatgtagccaacagggatgctgactatcgatcacatcattatcttcgagcggttttactccaccacgaccatccagtagccatgcgaaaacggcatccggcacgttcacatccgatcccttaatggcttccacagcgcctccacgttacaactctcatgccgttagtctagctttcgggaaaggttaagcaatctctcattttctcattgcgcaaaaagaatgacgggaacgtgcgaaaaaagcgccttagcaacaggcgcttaccaaacatgtattatcaggcctggccgcgcctggtgatggtcgaaagagatgatacatgagagtgcgacagcgcatgttcactgtaacccggctggcttaaacgaaatttgtcggttttagtctgtaactcgatcacctgcgcctttaaaacatccgaagaagcagatagcgcttcaaccattaagacattgctatgggttgcgctttccagatcgctcaacgccagggttatctggttaatgcctttttcctgctcccgcgtggtggtggaaatttcactcatcagcacgtttaattgcccggagccgccaacaatctcctgcatatttttttcagcctcctgcactatggcggccccctgccgcacattgtcatgcgtaacgtcgatcagcgccttgatactttttgccgcctcggcgctacgatgcgccagattacgcacttccccggccaccacggagaaaccttttccatgatcgcccgcccgtgcagcctctaccgccgcgttaagcgccagaatattagtctggaatgcgataccgtcaatcaatgaaataatctccgtcatctgcgaggcacagtcggtaatagaacgcatattttctgtaacccgcaccattaattcaccgcctttacgggcgcattgggttgcacaatccgcctgtatgctcgccattcgggtattatccgcattgtttttggtactcgccgccatttcatctatactggcggcagtttgaattaacgaggccgactgctgttccgtctttacggatagcgacagactgcgcgccgccagttgttcggaaagggtcattgccgtttgcgaagaggatctgatttcacgtaccaacgcggaaatattctccgacaggctattaataccggggatgagtcgcccggcgcaattattgccaaattcggagatatgaatagacaagtttcctgctgcgacctcttcaatacttttcttcacggtattaatcggcactaccagatagcaggtcatataccaccaaagcagtaatgccgagatcagataaatgatattacacgtaattaaaatagggagatcgtgcagaaaagctatttgtaaagtatccaccaaaagaaacgcacataccatgaatagaataatgcatgtcctgacgctgatatttatcaacatttttgacggcctacaaccaggataggagacaggttttatttttatagcatttcagatacctattgccattcgtttctgtgacattctccatattcaataccagaccatcgccatttcccttagtgcaacagataaaatcatctatattcgctatgccaggatattcatccatccatattgacaagtgatgtacttatcaccattttctgcttaatagttaagtcgaaagccagtatattttaatagacgcttaaataagcgaatgactgtttctccgtgttattaccgcggacagcgttatcgcccgttctcttgcagaatcctgagcgtttggatgaggcgttatatcaggcataaaatcgggttcgcgcgagcttgcgctggcggtcctgtccgccagcggcaacgatttaccgactacgcttcgcatggcgctcccagttatcctgtttagcctgcactgttttacgtaacgcgacataacatgccccgccgccgccatggtgcggcagcgccgaacaataagcctgtacatcttcaaactctgtcaaccagcgggccacatagcttcggacgatattggcatgcgacttcgcctctcgccctttaccatgaatgatcaggacattacgcaacccctctttctgcgcctccaggataaaacgaaacagcatttttcggcacgtttcgaccggctggcgtaacaaattgaggctggcctgctgagggtatttcccactgcgtaacttgtcgatgacaccctgctgcaatccttcccgacgaaattccagcggttcattcagcggcagaatatccagaaagcccgtcgtcaggaaattatcaagctgaagcgtgtcgatacgctggggcgttttaagattacgcgttggctgccagtgtacatcagtatggcgtttcagcggctggacatcctccatggcgtcaagaaacagcgctttatcgtcaaggttcatggttcatcctccagcgtttttgcgactgccgttatcataaccgtgccctgttataccgacaacggtttacagttatttccaataacagcgacaatgtcaggcaattaaccgcctcgccaggctctctttttctccgactacgatattactgtcgctaaatgtgttatccctgactatcttttaaggagtatggttgcgggtattcctggcatgatatcttgtctcttacgttagattaagacgatgtgagagaacggatgctgagattacttgaagagaagatagccacgccattaggaccgttatgggtggtttgcgatgagcagtttcgactgcgggccattgagtgggaacagtaccgcgatcgtatggagcaactgctaaatatccactaccgtcacgaaggctatgaacgcgtttctgcgactaaccccggtggactcagcgataagcttgcagattattttgcaggcaatctcgccgtaattgataccctggaaaccgccacggggggcacaccttttcaacgggaagtatggcaggcattgcgcgctatcccctgcgggcaggtgatgcactatggtcaactggcggcgcaactgggacgaccgggcgccgcacgcgcagtcggtgctgcgaatggtgctaaccccatcagtattgttgttccctgccatcgcgtcatcgggcgtaacggcactctgaccggatacgcaggcggcgtgcagcgaaaagagtggctattacgccatgaaggctatcttttattatgaatatacaggcaaaaagtgccttatcggtcacacttttatgtaaagcaacaacaaataaattacgtgttttcaaatagataaaaatattcatcaaacttatacttgaattattccttctccgggatagctcagacttacgcgctcaccaaaaagatgttaaaattgacaaatatcaattacggcttgagcagacctatgatcccggaaaagcgaattatacggcgcattcagtctggcggttgtgctatccattgccaggattgcagtatcagccagctttgcatcccgttcacacttaacgagcatgagcttgatcagcttgataatatcatcgagcgcaaaaagcccattcagaaagggcaaactctgtttaaagcaggtgatgaactgaaatcgctctatgctatccgctccggaacgattaagagctacaccattaccgagcaaggcgatgagcagattactggattccatttagcaggcgacctggtgggttttgacgccattggcagcggtcatcatccgagctttgcacaggcgctggaaacctcaatggtatgtgaaatcccctttgagacgctggatgacctgtccggcaaaatgcctaacctgcgtcagcaaatgatgcgtctgatgagcggtgaaattaaaggcgatcaggatatgatcctgttattgtcgaagaaaaacgccgaagaacgtctggccgcgtttatttacaacctgtcccgccgctttgcgcagcgtggtttttcaccgcgtgaattccgcctgacgatgacccgtggcgatatcggcaactatctgggcttaacggtcgaaaccattagccgtctgctggggcgtttccagaaaagcggtatgctggcggtgaaaggtaagtatattactattgaaaacagcgatgcgctggcggccctcgccggtcatacccgcaacgtcgcttaaacgtcagctaaaccattgatgttatcttctgccatatcgttaaatttttctcatttattgatctggcagaagcgcttcctctgtttcattcaccatatttgagttactctttagttacaaactgcgatgacagttgtaaggagaccctgtatggctatgtatcaaaatatgctggtggtcatcgatcccaatcaggacgaccaacccgcattacggcgagcagtttatttgcatcaacggattggcggcaaaattaaagctttcctgcctatttacgatttctcgtatgagatgaccaccctgctttctcctgacgaacgcaccgcaatgcgtcagggcgtaataagtcaacgcacagcctggatacgtgagcaggcgaaatattatcttgaagccggtgtccccattgaaattaaagtggtctggcacaatcgtccctttgaggccatcatccaggaggttatcgccggcagtcacgatctggtgttaaaaatggcgcatcagcacgatcgactggaagcggtcatttttacccctaccgactggcatttgctgcgtaaatgcccaagccccgtgtggatggtcaaagatcagccgtggccagagggcggcaaagccctggtcgccgtgaacctggcaagcgaagagccctatcacaatgctctcaacgaaaagctggtaaaagagaccttacaattggcggagcaggttaatcataccgaagtgcacctggtcggcgcctaccccgttacgccaatcaatatcgccattgagctgccggaatttgatcccagcgtgtataacgacgccatcagaggccagcatttactggcgatgaaagcgctgcgccagaaattcagcatcgatgaaaaagttacgcatgtagaaaaaggcttgcctgaagaagttatcccggatcttgccgaacacctccaggcggggatcgttgtgcttggcaccgttggacgtaccggactctcagccgcgtttctggggaacacggccgaacaggtcattgaccatctgcgctgcgacctgttagtcattaagcctgatgagtatcaaacaccggttgaactggacgacgaggacgattaatccctcttgcgtcctgccggatggcgctgccatccggccaataccctattcctgttactcatctccgccgaggaaatagatccccaaaggaatcgccagcagaatagtgaacaccagactgtaaacgaaaatcattgccgactgaatggcatacatagagcttgtccactcggacagtggaatatgatactgctcaatcacaccgccgatagtcgcgcgcgttaccaccgatgccgcaacgataaacactgccagcaggcataacagaaattttttccccttcgccgatttcagcttcatcatgatcatagtattgtcctttacagatgacttttttacctgatagcaacaataccatgacaatcgcgcgatgtctgctctataaaacgtgacattgtatttacataaaaagtaaaccgctgagattaaagctgatagcactatttcttctttttacttatcgatgatctacgcgtttatcctgggtaaaatacctgttaatcaggtcattctgagctgttatcgtaggaaggagcggaaaacaataatgttcactgaattttttctcaaaaacgcatttaatctggcgatacttttcagttgcggtatggcgttgctggtcgtgagattttggctcagccgtaacgtacagtggaagaaaggattcacgttccatgcggcacagttttttatttatgcaattattattgggaccatcgggagcatcctgaataatgctattgaagattataatttgcgttttatctcttccggggtcattgattttatctgcacctcgctcattgcgcttattctgacgataaaacttttcctgattattaaccaatttgaaaaagcacaggtcaataaaggtagagatgtcaccagtacccgtattctggcacgggtcataaaaataaccattattgtcgcgattgtcttactgtatggcgaacattttggcatgagtctgtccggtctgctgacctttggcggtatcggcggtatcgctgttggtatggcgggcaaagatgtcctgagcaattttttctccggtattatgctctatttcgatcgccccttcagtatcggagactggattcgttctcctgacagaaatatcgaaggtacggtcgccgaaatcggctggcgaattacgcgaattaacacattcgaccaccgcccgttgtacgtgcctaattccgtcttttcatccattagcgttgagaatccgggacggatgaccaaccgtcgaataaaaacggttattgggttacgttacgaagatgccgacaaaattggcctcattgttgacgctatcagaaacatgttgcaggcgcacagagatatcgatcagaaacagacgctgttggtctattttaatgaattcgccgactcttcgctgaatattatggtgtattgctttaccaaaacaacagtatggcaggaatggcttgccgtacagcaggatgtttacctgaaaattattgcgattgtccaggaaaacggcgctgacttcgccttcccaagccagacgctctatatcgatgacccggaggccgcgcctgcgacaaaataaaagatagccggtgcccgataagtgttatcgggcaccgaggcttccctgtccggatggcgggttgttagcgccttccttacggtgatcaacggctcttttcattcaccgtcatggtaaattcaagcacctcattagtgtcgttaacgtaggcatgaggcatgtcggttctggctacagcggagcagccctcccgaataataaagcgtctaccgtcgactgttaatgtcagtgttccctgattaacaaacagtaattcacaggtgtctgccggatgccctgccgattcaaactgttcaccaggatgcattatccattgccagagttccagcatatccggcccgctggttcccgccatcagttttgcgctgccgcctttctcgccgcgccacaacaccggaatagcatcccggtcgataagatggaccatcggctcgctggcgacgttgacaacatccgccacggacactcccattgccgccgcgatcttacataacagcgcaatgcttggattggctttacagccttcaatttccaccagcattcctttactgacgccggaacgccgcgcaagctcatccagcgacatctttttttggctacgaaattgtttgatacgttgggaaacagcttcatttattgtgctgacgtcggcgcccgccgtggtcgataagttgacttttttggtcattggtcgatatcatagaataaaatagtcattacaggattatgcgatgtcttctatgttaccgtcaatcagcccggaactggcccgtatcgctcccggctttcgtgcattaagtattaatgttattgccgctccgattcgcgatgcgcaggtcggagaaatcgcgctaaaagaggcctgtcaggccgtaattaacggccaaccggcgtgggcacaggcgcatatagacgcctggaatacggtgcttaaagcattcggcgcaaaaccaaagcgcaccccctgctcggctgaagcgctacgaaaacgcgtgttgaaggatggaacaatggcggcgctggatccggtcgttgatctttataacgcggtgagcctgcgctatgccgtaccggtaggcggcgaaaatagcgcggcttattgtggatcgccgcggctggttttcgcagacggtagtgaaacatttgatactctgaaagaaggacagcccgccaccgagtcgccagaaccgggcgaagttatctggcgcgatgacagaggcgtcacctgtcggcgctggaactggcgtcagggagtacgtacccgactaagcgcttcagataaagcgatgtggtttatccttgaaagcttgccggaaatgccggttgatgaattgtacgcggcaggaaacatgctgactgacggccttgaaaaaatgatgccaggtttacgttttgaatccacgttgataggtgtttgattgatattgcgtaacaggagaaataccatgtcgctgtttctgacaagttttattttcgaaaaaaaagagtacgacgaagagttttatcaactggatggctgaattgagcgctatacgcagtctgttgatggctatattgggatggaaagctataccgatgccgccagcggaagaatagttaacaattattactggcagacccgcgaatcaatggagctattgataaataatttacagcaccagcaggccaaatcacaaagtcataagtggctttccggttaccagacgattattgcagaaattcaggggtgccataacgttaacctgccccatccgctggcatcattttcagttccttatgcgtaatgcaatagtatatatattaaatgtgagggcacacaagagaatgcctgcgcccctgcattgccggttattcggttctctgtgcaggggcggtgctgatataagtgattagtaaacaggaagatgagtgatatctcgtggtacactaacacgcgtaaccacattgttttcatcgcactctatcaacgctctggcaaaaatactgagctcattaattttcagcccggaattatccaaaaactggcggcaagcgtagtcagaaacaaaaattatgccgggatgaatatcatgttcccgaataaaacgggcctgagcaaatggcgtatccatactcagcacatataccgcccgggttgagtggctacccgctgatttaaggcggtcactatagtcttttacctgccattcacaaactggcgtatccagtgacggaacgacaataatctgcttttttatccccgggatacagtaacccggtaataaattatggctcaccagcccctttgtgcagggtaatggttcgccttcagccagtataccgggtttgagggtcagttgcgttttgccaaaggtgacagcgtgttcctgacccaatgagatataatcctgtgttgttgttggcgtcataaaaacttctccttttaacgtttgtattattttagccataataattatttagcaatccgctaaaaaaccaggtgaacatccataataagatgatggtgataaaaagaattatattagacataataattaatatagttttatagtcttcctctgatggaaatttctttcgtgaaactcattgcatatttaaaagatatgtcaatacgttcattactatgcccacgataggttataacttgtgtatatttacctggaacattttctttcttaagagggccataatcccataagccttttaaattttcacgcgctacagtcttattaatgtgaacttcatttacaggattcccgtcgatatccttaacaatagttgtgatggtggcactttcacccggcgataatacagacttatctatactcataactgttaaatctgggcttggcgtattagatatagtttctgtttcaatatactggaactcagataccgatggcacaggcgtgtaccctgacgctgaagccatatccgtttcattataaatttctagtttaatctttgaaccccgatgttccttttggatattaaatttatgctcacatggcttttctcgtttaagtatatgctgagagttatctttattgatctgataatacgtacatactgtagtaaaagtttccgcagactgatagttattatccggatctctgatgcctacatttctggcattcctcgcaatagtcattcccggaaaaggtgtatacttttcaataaaaaagccaagtccattaaactgcaattcgtagctatcgcgaggtgttccaggcctgtgcccaacgctcggcgccgtaggaggagaaaacatcccgacggttgccgcggacgttgtcgacgaatccgccaagacgcttatcggcgcagccgccagaagcaggctatagataataagattatgtttcgacatacgcactgttgatcctttttaaaacattaattcgcatcagaggttgcggtattacccttagcatttcccttatcagaaataattctgacgcggatatatttattctgaagcgattccccattaagactataaggaagaagccaggtggcctttgtcgcacccggtacggattgccaggatttcatttcatccgagatttcccactgataattaaacgcatcagtacagtccgtgttatttacacaaagcgttctggctcgcatttctgttccgacgactggcgcagtaacgcttccgttggcctcttcagtacccggcgtaaaaagcacctccacagaagtgaccttctgcgcaatactgtctgactgcgcttgtagtagtacggtacccttcaccggatgtttatcgtctggtccgcttgcttcaatatgtaatttgagcgagcgggcatcatcgccgatatgggtcaccagaacccgttcaacccaatggccgtcacgctctgtaccaccgagcgctttaaatgccagacccggcgtatctgattgatacttaatatgacgtggtttgagcgacgcccactcctcttcagaacgctcgcgcacgtagtgccactcaataaccttcccctcttctccggcaggaagcggcgtattgatgacaaagttgccgtcctcaacctgaacatcgtcattgataacatttatccaggaacggaaactggtctcatcctgtgtcacccttaccgggatacgctcggaggtcacgcgagtaccccggctgtcagtcaccgttaaataaaggctatactcctgaccgtcggtcgccgtcagcggaagttgtggaaggataaggccgctgcccagactcccctgaagctggagtccggcgagaagctccgcatcacccgaccactcaaccttctcaaccgggtaacggctatctaccgtcgccattaatgtcaccagcgtcccggacaggcctgacaccggcattgccgtaatgcggattttgctggcctgctcccgatacgccatgacgatatcgtaattacgatcaacaaaggcacgccggttagtcgtattcgacggcgccccaacgttgcggtaatcaagctgttcatgtaacggcgtaccgaaggaataattgactctcagaccgccctctgcctgcgagccgccgttaccggcgtcccgatatcctgctctgacctcaagcaaggggacaggattccagaccagagccgcacctgcggcgcggggattccggcttaatgtaccgttacccaatagatcaactttatccccgtaatactgttcatatgtcagctctccactgaaccagggaaaatcggggagcgtgccttttgttcgcagatcaaagccatatgccggacgctcatcatgtaattcatgcgctgctgacattttccagccggtgagagggaaataatagttgccggaaaaggccagactgtctttatagacttccccgccaatgccgccacgcaagtgggaataacggatgtcggcatccagaaacgtattgacgccgagcagccatccattgacctcctggcggtaacccataccaacgttaacataggtgcggccatcgaaactgctgttgtcgtggtcgcgaaagccaagctgaccaaagagtaaagacgatgttgtttcctggacgggaataaacatatcgaactctgatgagcgatatttcgcgccatcttcaagattgacgccaccacggaaaataatctccggaaaagcgctctttatcccctcgttcaccagatgattagcggcctgccctggtaacgcctttatttttcctttggcataatcctccagcgtcccctcctgcagatgcggagaaatagacgatgccgtccccgcaatccacgactgaatttcattatcgctatcagcaatgaccggcagtggaatctgactggtaacaatggcccaggttatatatttagtaatgggttttttagaaaaaaccactgtattgtctcctgctatatccccctgcctggcagagggagtatttaaataagatgtttatttggcgataaccatcagcgacggatagcgcgtttattctccggcgtggctttcgtcgttttaggcgtaacgtggacacggaacagtttattctgctcagttcccttaataatatatttatgcttttcagcgttggtattattcagatcggtgaacttatctggtgtcccggcatccgccatctgccaggtaaagttataattactgacctcacactcagccgccgctgtggcggcacattccagtaccgcttcaagggtgccgcctaccactggagtgttggcgtcattggtaccgttgagttcatcagtcggtttaccactttcattcaccacattgatagtgacagaacgtagcttattagaaattgtaccgtctgcggcggagtcgccgctcaccccagaagatgcagaagttaataagacagtggcaggcaagaatgcactatccggcgtccccgttgccgtcttaatccggtaaacgattttaatttttttaccgcctgcatcagcaggaatggtaaaagccgtcccggttgccgccggggttccagaaggatcggcggcctcattatccaccagataccatttaatatcgtcggcattattcattttatccagcgataagggatccccatcctcatccctaataaaaacatccgctatctggagggttgaaccggtcgtcagttccccagacacttctattttttttgcattagtagttgccacaggacggtgaccaacagaagcaggtgtagcagaagaagccatatcattggctctggtattcgccaccgcctctactgagaccacggatgcacaaattgctaacgttaataaagatcttttgaagtacaaaacaattcccttttattaaatcattagaaataattacgagatttataatctcacgggctaaaaattcagggttattcaatcattttaaccgcctgtgaaattatgcccttcgccatgctaattacttagctttactggcaaaatccgatctccaagtgtaaagtttattcagaaacgtcaagcaatttaaatctttcttgttttgccagaaaagctaacaaccccccactggtttaataacacagtatatcaaacaccttaaatgtttatattttcggcttcaataaagaggaatgatgatgaaaaaagccataataatctcagtattagagcaaatagaaaaaaaatcttgaagagaggattgatattgaaaagctggttgttataacaggttattcgcgaaggagtttgcaggatttttttaaagaaaagtgtggcgtctctatcggaaaatatatcagacaacgcaagttgagcagaagcgccactctgctaaagctgacctctcagtcggtcacagatatcgcgttcagaatggggtttgattcagtgcagtcctatagtcgagagttcaaaaaaacatttggcgtcaatcccaataactatcgcaaggctgatttctgggatctcagaaacctacggcctccctactggcttgactgtgatgagcattatcagttcgaaatttgtcagcttacgtcaaaagaaattttcggatttcaaacgtctcatcagatcgcaacaaatgaccttcctaaaaaagcgtcgcctataaaatggaaaatcattcatgagacgctcagaacgtggggcgaaaatgtgtattgtctctcgtcttttaagccggataataccaaagaccaggtcatcgccgtaagcagtttttttggtatggaacataattccgtcgatggaggaaaaatacccatgtcgagggtaataaaatgtggtaaatatgcaaaattccattttgttggtcataaggaacaatatcaacaattttccaatacaatatatatgtgtatattaccaaaactgaatcttatcaggagagaaggagaagatattgaatacttccatttggcatccgtccaaaagcaacagaataatgaatccattgtcgatctttattattacatccctgtactgtaatgacttcgtaccatccacgcatttcatctgaaaagtcttctcttttcagaacggtaataaaactctcagtattgattctggtaaaataagtgactattaatatagttaacgttttgaaagaattgaaaaaaataaattgcgtgcacgcgacaccggagacagattactgacagtactgtacggtgtagtgatcaggtaatattggctacagtttacggtaaaagcaaagtccatactttaactattaatgggagtatgctggccgggcggcttgcggggccttcatgctcccacatttacaatgttggtatgattacattctctctatactttactgtgctaaccttttatctcgttgagataacgtttaattaaaatgctctctttttgatgtacattataagaggagacattattcatattttcgaaatcagggcagacgatatgtatacaaccatcagaaacacagcgctagcaatggtagcttgtttttcgtatatcgcacatgccagtacccaccctcctcttattatcaccaggggagccggaggagacgcctccggagccacagtcattcatgataattggcggcatggcactcctgacctggtcaatcttaccgatatccccatagataaaatcagaccagaaaaatacagttgcatactgattattgggcaaggagctataaaagagatgcttcttgcgaacaatgcctcagcaatactttccggaaaaacggttggtctgtatagtcatctgatcgatcagaacacgctcagattacttcggcaattgcagaacaaagtgagattcaatctcttttttacccgctcgcagataactctactaaaactaaggaatatttcagaatataattttttgagttctaaagtaaataatgtctggggacaagactcactagcaattgaaacagtggcacctgacaggggtaatataccggaaaaagcgcttcccctcaaaacaacagattatgtgatctggctgggtggaaactatactacttcctctggtacgcagcgtatcttcacaaacgatcagattgttgtagccctgaaaccactacataatgttatttcatcaaatgcatcgattgctattatgctttcaccacgtttttttgataatagcgtgagtaaagaagcaaaagttaaacgactgaaggcagtgcttaacaccttttcgcgaaacagggtcacattttatatgagtaaggagatgcttgctaatctgaaagaatttgatttgccagttcaactatccccttcttacgcagagctgatgcgaatgccctgggccagcgctacccggcattttgcctctgtggatcaatataacctgtttgctgatctcatacctaaagttacgccgtttcttcttgaaccgaatgatgccgatcaagctctctatgcgacggattatcttaatacccggcgtgtaagtctgacccaaaatattcttaaccacggttgtgactaaataaaacgcgcagaatccgggatagttagcaatccaaaacagaccgttagccatgagtactgtttatcttcactatacagggaacaaccaaataactgacaacacaaatcaagccgagacccggaattcggctatacaggcgctctattcaattcaggcccagaaacagtccggtacccatactggacacggcctcccaactgctttagcgcattaccagtccagcttcgatgcgccttctgtcgtctgcactatttcactggttttcataacgcgatgataaccataaacatcagcgtatttcgtcattccggttgcggtgtcaacctccggcttaccctgcgtttcaataatctctcccgtccgggtcgtcatggtataggtcgttgtacatccggctagcatcaacactgataagctaagtaccgtaataagactacatttttgcatttctcgtttccctggcacctctatttttgatgtactttaccgaataccgcaacggcaagatggatgattagggctattgctccctgtttgtccgtatctgactggctcaggttttttgatgcgctgcgttaatccggcagtaatcgctccagcacatccccagccagaagcacgctctcctgaagacgctccaggccataccccgctcgcgccttggcggaaagccccgccattagcgtccccataaagtccgtcgtccggtcagcctcttgcggataccgcatggcgacataagtgcgaatcaggttttcagcagcgatgtaaaactcgcaggcggcctctcgtgccggtttatcgttacaatgagcgccctccagaaccagacacccagtggcatcaggatcggcagcgtaacgtcttgccgcttccatcagcacatcgataaggcacttcgcggtcgggcgatcgtgacgcagaagcgccccgagcggaatcgcgtcggtcatcctgtaacgctttaatacgcgagtatacagccccaacttgctaccaaacgccgcatagaaactgggaggattgatcccgaacgcttttgtcagatccgctacgctcaccgcgtcgtagccgcgcgaatgaaataaatgttgagcggtttcaatggcttgctccggatcgaactggcgagggcgacccggcgttcggctatgttttgtagtcattactacataactccttgacggcatgatttcattacgcatattgtagtggctactacaatatcataaaggacatcctgatgacgctatttcgcaacaaatctgtactggttttagggggaagtcgtggtatcggcgcggctattgtacgacgctttagcgctgacggcgcatcggtcgttttcagctacgccggatcgcgtgaagccgccgaaaaactggcaacggaaaccggaagcatcgccatccagacggatagcgccgatcgtgatgccgtcatcagcctcgtgcgtgagtacggaccgctggatattctggtcgtcaatgcgggcgtcgctctcttcggcgatgcgctggaacaagatagcgatgcgatagatcgtttgttccgtattaatatccatgcgccttaccatgcgtcagtcgaagcagcccgcaacatgccggaaggtggacgcattattattatcggttccgtgaatggcgatcggatgcccgtaccgggaatggccgcgtacgccgccagtaaatcagccctgcaagggctggcgcgcggcctggcccgtgattttggcccccgcgggattacgataaatgtggtgcagccaggcccgattgataccgacatcaatccggaagatggccccatgaaagagctgatgcacagtttcatggcgatcaaacgacacggaagacctgaagaagtggctggaatggtggcatggcttgccggtccggaagcctctttcgtcaccggcgcgatgcacaccatcgatggtgccttcggcgcctgacggccaggcgaatatcacacggttgccgtctacgctccggcaaccgtgttagaagctgttcatgcgagaaaacatccgcaagcgccgggatcaatcgtggattttaacgccaagacaaccgcgaacaaattcaggattaaaatgcttcaccgcttcgccaacgtagcctaaatcaagggcgttgatttgagccatttcgttatccgttagtgagaaatcccagatagcaaagttctcttcaatacgttcctgtcgagtggatttaggaataaccgtgacgccacgctgcacgttccaacgcaggacaacctgcgcgatggttttttgatgggcatcggcaatcccttgaagcatgacattttcatacggtttatgtctcccgccgcctaacggcgcccacgcttcaggctgaacgttataatgcttcatggtttccagcgcggcgggttgtgcaaagtatggatgcaattcgacctggtttaccattggcgtaattctgacggtttcacagaagttggctaacacatgcgcatagaagttggacacgccaatggcttttagtttaccggcttcataagcgtcctccagcgcgcgccacgcgctaaaataatcacccattgcctgatgcaataaatagagatcaaaataatctaacccggattttttcagcgacgcttcaatacctgctttggccagatcgtagttagccatatcttgcacccacagtttagaagtaataaataactcctcacgggtacacagacctgtcgcgatggcttcacgaacagcgtcaccaacggcatcttcattgccgtataccgcagcggtatcgataagacgataaccgctgcgaatagcgcttaacactgactgctgacattcttctttgtcggttaccttaaaaacgccaaaaccaaccataggcattttaaggttgttacttaatattgaatattccacgctaaagcaccctttcgtcgtaaagacgccatgataagagcaaaatacaggtacaatgagtattgttaaatacgattatatttatacaaaaagttcattaataacagttgtacagattttttattgcatctaaacgttcagtgcttgctatatcctcgccgtgtagcacctgtttgataatgacttttcttatgcgtcaaaaccagtaccgtcattttgaccgtctgtgaaaaagttttctgaacaggcaatgcgatatccggaataatatttttagcgaagaggcgccggctggctcagcgccgttttgcaccagtcataaaaagcgcgtaccgcaggcggcagaaacctgttttgcggatagaccagcgcaagcggcaaatcataagaatggttgtccatgcaggtcaccagcgccccgctgtgcagatacggcgcaaccagatagctggcgacgcgaattaaccccagtccctgtattccggcctgaatataagcgtccgtatcatcgacaaccagcgtctcctgcacccgtatcgcgtaatccttcccttcacgcgtaaaaaaccagtcgatggtacgcccggtgcggtggttcaggtagccgaccgcatggtgcttttgcagatcatctaaattttcagggctaccgtaacgctcaatgtaagtgggcgatgctgctatcacccagttaaagctggcaagtggacgggcaaccagcgtggtggaatcatcgatcctgccggcccgaatcacgcagtcatacccttgaaggataatatcctccacgctatcgctggaacaaagtatcagctccagctccggatactggcgcaaaaaggccgggagcgtgggaataatgcaatgtcgggcgagagattgcggcatccccactttaaaacgccctttgggttgtgccgcccggccgggaaatgacgactccatggccgcgatatctgccagcactcttttgcactcttcgtagtaacgccgcccctctgcggtcacactaagtttgcgagttgtacgttgcaaaagttgaatcttaagccaggattccagttctttaaccactcgcgataccgttgagcgcggcacgcccagcacttcggcggctctgataaaactatgggtatccactacgcaaacatagacctgcatcgcttccagcttgtccattttccccccgccaattatcccatttatcagaacagtctaacccgtcttcggcgtcttatcgaacgcagatccctgacgtaatctctatctacaggtgaatcaacacagagaggcgcaaatgaaacaatccaataatcaggtgggtgaaaaagtattggtgctgggcgcgggacaactgggggcgtcagtgctggcgtcgttggttccggcggtcacacagcgtaatggttccgttagcgttattgtgtcagggcgatccagggataaacagagcaaacgacgttccagcattcatcaacaactggcagatgccggtgcgcggtttatcccggtcgacatcgcaggcagttcggttgcagcgttaaaagatcaattccacggttttgatacgatcatcaattgtatggggtttgtcgccggtgcgggtacccagataaaaatcacccgcgcggtactggaggcgggcgttaagcgctatttcccctggcagtttggcgtgaattacgatgtggtcggcaaaggcagtggccagccggtgtgggacgaacagtatgacgtcaggacgcttttgcgcgagcaaaacgtcacagagtgggtgattgtttcaactggtatatttacctcttttctcttcgaaccagcctttggtgtggtcaacttagccaaaaaaaccatcaatgccctcggcggatgggaaatgcaggtcaccgtcacgtcgcctgcggatattggtcgcctgaccactgaaatttatctgcatcagccgcgtatcactaacgaagtcgtctttgtcgcgggggaaacgacctcttatgcaaaactggcggaaacggtcgaacgcgtgacgcagcaaacttttacccgaggcgtattgacgctacctgacttacaggagcaactccgtttacatccgcatgacccaatgctgcgctatcgcgtcgccttcgcgcgtggtgacggtatgtggtggccgatgagtgacacctggaatgcacaacatcatctgccgacacaggatattgccgcctggctgaaaacacagcaatgagaacggcggcatcaggcgctcgcttaatccccatgccttctgccagcatcaggcggcgggcgtggctaccttgcgttaacaagaaaccagtacgcatcagtgcttcacgatatacattgtacggctataggccacatcttccgggttagtaatggggtatccctttacccacggtttaattaaccggccattggtatactgataaataggcgctataggcgcttgttccgttaaaattttctccgctgcattgtaatccgcgttacgcgcttcggcagtattttccatcgtcgcttgcgtcaggattttgtcataagtcggattagtaaagcgtgaaatattccccgtatgcgtggacgttaataaggataagaaagtcgacggttcgttgtaatcacccacccaggaggcgcgaataacatcaaaattaccggtattccggctgtcgatatacgttttccactcctggttttgcaatttcacatccacccccagatttttcttccacattgacgccaccgcaatcgcgattttctgatggttttctgaggtattgtaaagcagggttaatttaagcggcttctgcgatccgtagcctgctgcacgcagcaatgttttcgcctgggcattaagttcttcctggctcatttgttcaaacggtgaaggatcgggcgtaaatcctgccgtgacatccggtgtaaaatgccaggccggtttttcaccggtacctaagactttttccgccatcaaacggcgatcaatggtcatacttagcgccagacgaacgcgggaatccgccgtcggccctttctgcgtattaaacgcataataataagtccctaattgcggcggtgtataaacttgccctggaatatccttcaataatttctggtacatatttttagggaaagattcggtgatatcaatatcaccggcaaggtaacgtttcgtcgcagccgattcctggttaatgggtaaaaatgttactttttgcagtaccgttttcgcgttatcccagtaatgcgtattaggcacgaccaccagtttttcatttaccacgcgctctttaagaacatacgcgccattgccaatcagttttcccggcttcatccagtctttgccgctttcaacattcgctttttggaccggataaaaggcaaaactggcggtcagactggcaaaccagggcaacggcttgtcaagctgaacacgcaaagtgtgcgcgtccacggcactgacgccaagctgatccggcgtgactttaccgtcgataatggcttgtgcattagtgatgccagccagagcggcaaaccaggcgaagggggaaagcgttttgggatcaacgaggcgttgccagctatagacaaaatcctgggcggtcaccggcgttccatcggcccattgcgcatcatcccgcaacgtaaacgtccagatacgattatcattgctcttccactggctggcgacgccagggataatttcacccttttcgttctggttaaccagcccttcaaacagatcgcggatcacctgaatttcaggcagcccaacggctttcgctggatctaacgaagcgggctcatctttgatatgacgcaccagttcttgtttttctgccagtaccgttccgccgggaacatccgcagcatatgccagggaaaagctgctaaccaacagcgcacaacaggttactgaaacagaatgcctcatagaagttcctcaaagatgagttaaatgacaacgtaattatttgtttcagcagaaagaaatgcaattatcttccgccagaaagttgatatcgcgccatacaagagggtaaatagaaaccatttgataatcggcgggttttacacaacactacgatgattaccctactggtctcagcttcgggaaacgcgtatgactgtcacccgcccccgtgccgagcgcggcgcatttccgccaggcactgaacattatggacgttcgctactaggcgcgccgctaatctggtttccggcgcctgccgtcaatcgcgaaagcggcctgatactggctggcacccacggggatgaaacctcatccgtggtgacgctctcctgtgcgttacgcaccttaaatccaacccttcgccgtcatcatgtcgtacttgccgttaatcctgatggctgtcaactggggttaagggcaaatgcgaatggcattgatctaaaccgtaactttcccgccgccaactggaaagcgggtgagacagtttatcgctggaatagccgcgcgcaagagcgtgatgtcgtgctgctaaccggcgaccatcccggctcagaaccggaaacccaggcgctttgccagttaattcatcgactccaacccgcctgggtcgtctcttttcacgatccgctagcctgcattgaagatccacgtcgcagcgagctaggcgagtggctggccgatgcgtttgcgttgccgctggtgaccagcgtaggttacgaaacgcccggttcgtttggcagctggtgcgccgacctcaacctgcactgcattaccgccgagtttccccctgtttccgccgatgaagccagcgaaaaatacttgctggcgatgtcgaatctgctccgctggcatcctaaagatggagttgacccgtcgtaaagcgtagcgcgggctcaacatcaaccgccagccatgttgggccatcaagatcggcgaagctcacctgcggcataagcggcagcgcggcgctaatcgctcttgatgtacagagcatacagcccagcatcaggccgaatccttgctcccgcgcctccgttgccagcgccagcgcctcggtcagaccgccggttttatccagcttaatgttgatcatatcgtagcgccccgtcagggctttcagactactgcgagtatggcagctctcatctgcacagatgggcaacggatgaataaaattttccagggcggcgtcatcctgcgcgggcagcggttgctccagcatcgcgacattcagatccgccagtaactggcaacgcgccgccagcccctccggacgccacgattcattggcgtccacaatgagcgtcgcctccggcaccgccgagcggatcgccaccatacgttcgctaatcaaacgagcatcgagtttaattttcagcaacgtcgcccctttttcccatagtgccgccgcactggctgccatctgttccggcgtgcctatcactaccgtttgcgcggtagtaaaaaccggggccagcgtcacgccgagcagcccggcaaggctttgctgccgctggcgggcttgcaaatcccataaggcgctatccaccgcgttgcgcgccgcgcctgccggcaacagtttctgcaatgcttcgcgagtcagcccgttttccaactgaggcacaatactcatgatttgcgccatgaccgaggcatcactttcaccataacgtggatatggcgtacattccccgatgcctttcacgtcctcttcttccagttcgacaacgacaacatgcgcttcgcttcggctaccacgcgcaataacaaaaggcgtatgtaacggccaggtttcctcatataccttaacagatctcatctcttcccctctgatagcgccggacgcggcttgctacaaatagtatttgccgtgttaatgaataatgacttaaactggatttcgacgttaactataagtaaataggaacataattatgtcacagactgtacatttccagggtaacccggtcaccgttgccaacgttattccgcaggctggtagcaaagcacaggcttttactcttgtcgcaaaagatttgtctgacgtttccctcagccaatatgcaggcaaacgcaaagtgctgaatattttcccaagcattgatactggcgtatgcgccgcatcagttcgtaagtttaatcaactggccacagaagtggagaataccgtcgtattgtgcgtttctgctgacctgccttttgcacagtcgcgtttttgcggcgcggaaggcctgagcaacgttattacgctttccactctgcgtaataacgagtttctgaaaaactacggcgtcgaaatcgttgacggcccgctgaaaggtttggcggcgcgcgcagtcatcgtgcttgacgaaaacgacaacgttattttcagccagttggtggatgaaatcacccacgagccggattacgacgccgcgcttaatgtcctgaaggcataagccagcgcctgctggcgctacgtttgtcagtgctacaggcggtgctcttttgtcacaagaaggcctctatccggaggccttcttgttttctactcttcacccttcttctggctcagaccatattcacgcagcttattggcaatcgcggtatgcgatacccccaaccgtttcgccagtttacgcgtactcggatagctacgataaagctgggtcaggacagaacgttcaaaacgactggtaatgtcatccagcgagccttccatcgcatcctcgccgactgccaccgtcgcggcatcgtagtcaggcagcaggatatcctgcggacgcagctcatacccttccagttgcgtcagcgcccggtaaatcgcatttttaagctggcgaacgttacccggccagccgtaacgagtgaggaccgtactcagatcggcagacagtttcggtcgcggaacgccctgttcgtcggcaaaacgcgccacgaacagttcggtcaacggcataatatcctgcggacaatcgcgcaacggcggcaaattaagcgtcagaacgttaagtcgataatagagatcttcgcggaacagtcctttttgcaccagctccaccagatttttctgcgtggcgcagataacacggacatcaacatgaatttcgtgatcttcgccgacgcgacggaacgtaccatcgttgagaaaacgcagcagcttcgcctgcatacgcggcgacatttcgccaatttcatccagcagcaccgaaccgccattcgcctgttcaaagaaaccttttttaccttccggcgcatggccaaatagttcgctttctaccgcatcttccgggatcgaagcgcagttgagcgccagatacggtttcgctgaacgagggcttgcctggtgacaggcataggcgaaaagatctttgccggttcccgtatcgccggtaatcagcagcggcgcgctgagcatcgccagtttgcgcgcctgctcaacgacgtgcttcatctttgcgctcacggcaataatctgactaaacgcgctcagatcctgcgtggacaaattctgtagctgctgccccatacgaatcgtggaacgcaacatcacgaccgccccggtcaacacgtattcgtcattttcgttttgtaaatgtaccggcgtaatctccatcaggaagttttgcccgttgatcacgacatgttcgttatgggagctttgcgggttaccgtccagccagcgctgaaaattgaagccgttgattaattgtgcggcggtatggtgccgcattcgctcctggctctgggcaaaaagttgacaactcgccgggttcgccatctccactttactcttcatatccaatgagagcaccggctccggcaacgcctcaagcagcgcgctcagggccagatgttcacgttcggacggcatccagggaacggtacggacatccgttacgccggaaatacggcggatttcggccatcaggctgctgaagtcggtgaattccagctcagcaaaattaagataaattcgcccaatgggatcaatctcgattccgcgtaaatcaatgctacgtaacaccagtaaatcaagtaattcgcgggtcagaccaagtcggtcttcacaaaagacttccagacgcatgggaaccttcacctgaataatgaaccattaaatagatgataagccactattcggctggcaggaaggattctgtcaacaaatattgacagcatggcggaaaaacgggcgctgcggcgtaaagccaggccgtcagcgccatgtgaaaggtcatttctcaggcgacgacttactcttttgcagcgtctcttttagctgaccgataagctgacgacgaaaatcaccgagacgtggtttatcgttatcgatccacggcaatggtcgacatagctccatcgcttttattcccagtcgagcggtaaggagacctgcgccaatcccctgcgccgcacgcgtggacaagcgtgcggccagatcctgagacatccagtccataccgacttcacgcaccagctcactggctcccgcaaacgcgatattcagcaacaccagacggaacagacgaaggcggctgtaataaccaagttcaatgccatacagcgttgcgatgcggttaatcaggcgtaaattacgccaggcaataaacgccatatccaccaacgctaacgggctgacggcgatcatcagagtcgattccgcggcgaaacggctaatctcacgtcgcgcctgcgcgtcaagtaccggctgtaccagattcgcatacaaaccgacgatttccctgtcgttttgcgtttcgtgaatagcggcataccaacgttgtaatgccggatgtgattgatcaatccccgcctgctgcgccagtttttcgcaaaatgcgcgacctttcccgacgctatggctatgtaacagttcacgcgcttcatcgcgttcatgcgcccgctggcgcaagcgccataatcgccgccactccgtgaccaccgatcccacgccagcgccaacgatcagcgcgcctgcggcacagccgcctaaagcgacccagtcctgagtttgccaggcattcattgtccactgtacgccttgcccgaccacgctcgcgccaaacagcgccagtcctcccatcaccattttacgccacaggctgcgtttggggcgcagcgcggcatcgaccgccgcttctgccgcgccttcgtcttccgggcgctcatcgatagctgcaggcgcaaatgtacgcgactccgcttcgctgaaagtttgctgcgctttgaaggccgacgtaggttcctcctttagcggttctgcaaaatcaatacgcggttttaacggttcgctcatcgcagcttatctcctattaaaaactccagcgcagcgtccagacgaatatgcggtaacggtttatcaacatccatcacctgcggacgaaaggcttcgaactgaaaaccctgactatcccaaaacgcttgccccggcaaacgcgaaggcacttcgccggggtacacggttaacggcgcgccgtcactcaaacggtttccacgtaaagccgggattttttcgccgttgacctcaatcacaccgctggtggtcgcctgtaccgacgccagccccaggcaatccatactaatgccttcaaacgcggcattttgccaggcatcctgaataagctgctggagcaaggccaccatattggcatgttggtcgagggtgacatggtcggctttcgtcgcggcgaacagcaatttatcaatcaccggcgaaaacaaacgacgaaacagagtccgctggccatagtgaaaactttgcatcagctgcgttaaggcgagacgcatatcattaaacgcctgcggcccgctattaagcggttgcagacagtcgaccagcacaatctggcgatcaaagcgtagaaaatgatttttgtagaaccctttgaccactttttcgcaatagtagttaaagcgttcgcgcagcattccagcgttggtctgtttatccgcctgcgccagttttgactcgccgaaggcgtccacatccggccacgggaaaaactgcaatgctggcgcgcccgccatatcgcccggcaaaacaaaccgtccaggctgaataaaatgcaatccctgcgatttacactgatgcaaataatccgtccaggcggcggcaatctccgccagccggttttcatcggcgggcgccagcggatcgagcccgtcgcaaagttgccgccattttgcggcccactcagcgcgttgtccttgtaacaagccgttcatctgacgggaccagcttaaataatcctgagccagcatgggcagatcgagtaaccattcccctgggtagtccacaatctccagatacaatgtcgaggtatctttaaaatggcgcagcagcgagtcgttggagcgatagcgcaacgccagccgaatctcactgacgccgcgcgtcggtgtgggccaggcgggaggattgccataaagctgaagtatcccctcgtcgtaggtaaaacggggaataccaaaatcacgttgaggcacacgctttacgccaagcaggcgttcttcgcgtaccgcgctgagcaacggtaagcgcgcgcccgcgtggacattaagcaactggttaaccatcgccgtaataaacgccgttttaccgctgcggctcaacccggttacggcaagacgcaaatgcctgtctaccccacgattgaccagcgcgttgaattcagttttaagtcgcttcattgacatcctgttgagcctgaagagaagaaaaaataataatgagcctgcgttatagatatgtgcaaaaacgttattatcaactacccggagagatcaacaacggcgcattaagcgccgcggttagtatgagtattgagcaatagattatctatttttttactttcggcatatcaagacgactgataccgcccatattcatcgcgtgcgtataccccatatcaagcaacatttgttttgccatgcccgactgtcgcccggagttgcaatataactttaccgtatcgttcctgtctggaactaccgtttcgatatgagatttaatctccttcaatgggatattaatcgcgccctgaatatgctctcgctgatattgttccggaatgcggacatctatccagtattctgcggcataaagcggcatggctatgaataacgctaacgcaaatattccttttttcaacatacttccgtcctgacacgtaatgtatttcgcacacactatacgccagagcttaacgaaatattatgaccagactcgctatttgtaacgctgcgaaattttattcgccgccttacgaagtactggctccagcgcaaacgccagcaacatttttagcggacgacgggcgacggattttaccgcccatcccgccacgccggcaggcccgtagcgtaacgcggtcaacagaaccagcttacctgctattttgaagccgggcttcaccttctgcccggcgcgttgccagcgagtattcatcttcaccttcccgatatatcacttacagttgacggaaacgactacgcagtgtgaacgtatctgacgtgacgtagcgttccatttctcgcaaacgcttttcgcctgcggcaagctctctgtctacggtatccagcagttcgccgctggtcggctgcggtttgcctgcggccagattatccggcatagggtccagtacaaaagacagaacgatataggccactacggtaaaaaacgccagcccaaagaaaatcgacagcacgaccagaatacgcaccagttttaccggtacatcaaggtagtcggcgatcccggcgcaaacgccacgcaccatgcccttttgcggcatacgccatagttttttattcagattgattccacccattagcgctctctccagttcggatgctctgcatcaagaatgtcttccagcgcctgaatgcgctcgcgcatacgttgcgcatcgtctgtgagttgcagtaagcgttgctgctcgctttgcgacagttctccccgaccggcgcggttgctgtaatgcagccacagccaaatcggtaacacaaacaacacaaaaatggttaacgggatggccagaaatagcgcgctcatgcgttctccttacacctaaagctgatgagcgacggcgcgtatcggcgccgccattgtcattattgattatcttgcttcattttggctttcaactgcgccagctgctcgctgatttcatcatcggctttcaggttggcaaactgttggtccagcgattgctgcttaccaaaacgatggctttccgcttccgcttccatttgatcgatacgacgttcaaaggattcaaaccgcgccatggcttcatccagtttgccgctgtcaagctgacgacggacatcgcgggaagaactcgccgcctgatgacgcagcatcagcgcctgctggcgagcgcgtgtttcgctgagtttgttttccagctcgccaatctctttcttcatgcgcgccagcgtgtcatccaccagcgtgacttcctgttcaagcgtagcaattaaatcggtcagcttttgtttttcaatcaatgcggcgcgcgccagatcgtctttatctttgcgcagggccagttccgctttttcctgccactcgatctgctgagccgtagcctgttcaatacgacgggataactgtttcttttccgctaaagctcgcgcggagttcgagcgaacctccaccagcgtatcttccatctcctgaatcatcaggcgcaccagcttctgcggatcttccgctttttccaacaacgcattgatattggcgttcacgatgtcggcaaaacgagaaaaaatacccataattcaatcctcacataatgttctgataacgggcgatgccctgctatgtgattaatacaatttgcgtgccaacttttcataccactgataataaagaaattgtttcgttttacctcgccagcaaaaaaggataaagtggtgaaaaacactaacaagtggcgattttcatcatggctgaatttaaagataacctgctcggcgaggcaaaccgttttcttgaagtactggaacaagtctcccggctcgcgccgctggataagccagtgctgattattggcgaacgcgggacgggtaaagaacttatcgccaatcgactgcattatctctcttcacgctggcaggggccgcttatctcgcttaactgcgcggcgcttaacgaaaatctgctggactccgaactgtttggccatgaagcgggcgcttttaccggggcgcaaaaacgtcatcccggtcgctttgaacgcgccgatggcggcacgctgtttttggatgaactggcgacagcgccgatgctggtacaggaaaagctgctgcgggtgattgaatatggcgagctagagcgcgtcggcggcagccagccgttacaggttaatgtgcgattagtatgcgccactaatgccgatttacccgccatggtgaaggaagggacatttcgtgccgatctgctcgacaggctggcttttgatgttgtacaactgccgccgctgcgcgaacgccagagcgatatcatgctgatggccgagcactttgctattcagatgtgtcgtgagctacgtctgcccttatttcccggttttaccgatcgggcaaaagaaacgttgttgcattacgcctggccaggtaatgtccgcgagctgaaaaacgtagtcgaacgttcagtgtatcgccacggcagtagtgaacaacctttggatgaaattgttatcgatccttttcaacgccatcccgctgaaccgcccgcgcccgccctgccagcggcatccgtcacgcctgacctgccgctcaaattacgtgagtttcaactgcaacaggaaaaagcgctgctgcaacgtagcttacagcaggcgaagtttaaccagaaacgagccgccgatttgctggcgctcacctaccaccagtttcgcgccttgcttaaaaagcatcagctttagctatttctccggctaattgacgacatttacgccagttatccaccgacatttttacgtggcgggccgaagtgcgatacactttgcaaattgaacttcaaaaacttaactattatgcgcctggttttatcgtctctgatcgtgatagcgggtctactaagtagtcaggctacggctgcgactgcgcccgaacaaactgcgagtgcagatattcgcgatagcggctttgtgtattgtgtcagcgggcaggtcaacacctttaatccgcaaaaagcgagcagcggcctcatcgtcgataccctggccgcccagttatatgatcgcctgttggatgtcgatccctatacttatcgtttagtcccagagctggcagaaagctgggaagtgctggataacggggcaacgtaccgttttcacctgcgccgcgacgtttcctttcaaaaaaccgcctggtttacgccgacccgaaaactcaatgctgatgatgtcgtctttacctttcagcggattttcgatcgtcgacatccgtggcataacatcaacggcagtagcttcccctactttgatagcctacagttcgccgacaatgtaaaaagcgtgcgtaagctggacaataacaccgttgagtttcgcctgacgcagccagacgcctcctttttatggcatctggctacacactacgcttccgtcatgtccgctgagtacgccgcgcagcttagccgaaaagatcgtcaggaactgctagaccgccaaccggtcggtaccgggcctttccagctttcggagtaccgtgccgggcagtttattcgtctccagcgccacgatgggttttggcgcggcaaaccgctgatgccgcaagtggtggtggatttaggctccggcggtaccgggcgtttatcgaaattactgaccggtgaatgcgatgttctggcctggcccgccgccagccagctaactattttacgcgacgatccgcgtttacgtctgacgttgcgcccggggatgaatatcgcctatctggcctttaacaccgataagccgccgttgaataatcccgcagtgcgccatgcgctggccttatcgatcaacaaccagcgcctgatgcagtcgatttattacggcacggcggaaaccgcagcctccattttaccgagagcctcatgggcttacgataacgatgccaaaattacggagtacaatccgcaaaaatcgcgcgaacagctaaaagcgctgggcattgagaatcttacgctgcatctctgggtgccgaccagttctcaggcctggaacccaagtccgctaaaaacggcggagcttattcaggcggatatggcgcaggttggcgtaaaagtggtcattgtgccggttgaaggtcgttttcaggaggcgcgcctgatggatatgaatcacgatctgaccttatccggctgggccacggacagcaacgatccggatagctttttcagaccgctgttaagctgtgcggccatcaattcgcaaaccaatttcgcccactggtgtaaccctgaatttgacagcgtgctgcgtaaggcactgtcgtcgcagcagttggcttcgcgcatagaagcgtatgaggaagcgcagaatatcctggagaaagagctgccgatactgccgctggcatcatcactacgcctgcaggcttaccgctacgatattaaagggctggtgttaagcccgttcggcaatgcgtcttttgccggcgtctcccgcgaaaaacacgaagaggtgaaaaaaccatgattatcttcaccctgcgtcggttattgctgttgctggtgacgctcttcttcctgacctttatcggctttagcctgagctattttacgccgcatgcgccgctacaaggcgcatcattatggaatgcctgggttttctggttcaacggtctgctgcactgggactttggcgtgtccagcattaacggccagctgatctccgaacagcttaaagaggtgtttcccgccacgatggagctgtgcattctcgcctttggttttgcgctgatggtcggcatcccggtcgggatgctggcgggcgtgacgcgtagcaaatggccggatcgttttatcagcgcgctggcactattaggtttctcaattccggttttctggctggcgcttctgctcacactgttcttttcgctcacgctggggtggctgccggtatccgggcgatttgacctgctttatgaagttaaaccggttaccggtttcgccatcattgacgcctggatttcagattcgccatggcgtgatgaaatggtgatgagcgccatacggcatatggttttaccggtgctcacgctctccgtcgcgccgaccacagaagtgatccgcctgatgcgaatcagcactattgaggtctacgatcagaactacgttaaagcggcggccacgcgcggcttatcgcgctttacgattttacgccgtcacgtgttgcataatgcgctgccgccggtcattccccgtcttggtctgcagttttcaaccatgttaacgctggcgatgattaccgaaatggttttcagctggcctgggctgggacgatggttaattcacgccattcgtcagcaggactatgccgctatttccgctggcgtgatggtcattgggtcgctggttattgtggtcaatgtgatttccgatattttgggtgctatggctaaccctctgaaacataaggaatggtatgccttacgatagcgtatacagcgaaaagcgcccgccaggcaccctgcgcactgcctggcgtaaattttatagcgacgcgcctgcgatggtgggtctgtatggatgcgccggtctggcgttgctgtgtatttttggcggctggatcgcgccctatggtatcgatcagcaatttctgggctatcagctactgccaccctcctggtcacgctatggcgaagtctccttttttctggggactgacgatctggggcgcgatgtgctgagccgcctgttaagcggcgcggcgcccacggtcggcggcgcgtttatcgtaacgctggcggctacgctatgtggattagtcctcggcgtagtggcaggcgcgacgcacggtttacgctctgccgtgctgaaccatattctggacacgctgctttccatcccttcgctcttgctggcgattatcgtcgtggcatttgccggcccacatctgtcacacgcgatgtttgccgtctggctggccctgttgccgcgaatggtacgttccgtctacagcatggtgcatgatgaactggaaaaagagtacgtcattgccgcccgtctggatggcgcgacaacgctgaatattctgtggttcgccattttaccgaatattaccgccggtctggtcaccgaaattacccgggcgctgtcgatggcgattctggacatcgccgcgctgggatttttagatctcggcgcgcagcttccctctcctgaatggggcgccatgttgggggatgcgctggagctaatctatgtcgcgccgtggaccgttatgctacccggcgcggcgataacgctcagtgttttactggtaaacctgctcggagatgggattcgtcgtgcgattattgcgggggtggaataatgccgttactggatatccgcaatctcaccattgaatttaaaaccagcgaaggttgggtaaaagcggtcgatcgcgtcagtatgacattaagcgaaggtgaaattcgcggcctggtaggtgaatcgggttccggaaagagcttgattgctaaagctatttgcggcgtcgcgaaagacaactggcgagtcactgccgaccgtatgcgttttgatgatatcgatctgctgcgcctctcctcacgtgaacggcgtaagctggtcggacataatgtgtcgatgatcttccaggagccgcagtcgtgccttgatccttccgaacgcgtcggccgccagttaatgcaaaatattcccgcctggacctataaaggccgctggtggcagcgtttaggctggcgtaaacggcgtgcaattgaattactgcaccgggtgggaattaaagatcataaagacgcgatgcgcagttttccctatgaactgaccgatggtgagtgtcagaaagttatgatcgctatcgcgctggcgaatcaaccgcgactcctgatcgctgatgaacccaccaactcaatggaaccaacgacgcaggcgcaaatttttcgcctgctgacccgactgaatcaaaacagtaataccaccattctgttgattagccacgacctgcaaatgctgagtcagtgggctgataaaatcaacgttttatactgcggccagacggtagaaaccgcgccaagtaaagatctggtgacgatgccacatcatccttatacgcaggcgcttatccgcgcgattccggattttggcagcgcgatgccgcataaaagccgtctgaatacgctgccaggcgcgatcccgctactggagcagttaccgataggttgtcgtctggggccacgctgcccttacgcgcaacgagaatgcattatcacgccacgcttaaccggcgcgaaaaatcatctctatgcctgtcattttccgctgaatatggagagagagtgatatggtggaaactctgcttgaagtgcgcaacctgagtaaaacctttcgctaccggacaggatggtttcgtcgccagaccgtcgacgccgtgaaaccattaagctttacgcttcgtgagcgtcagaccctggccattatcggcgaaaacggttccggcaaatccacgctggcgaagatgctggccggcatgattgaacccaccagcggcgagcttcttattgacgatcatcccctgcattacggcgactattcgtttcgaagccaacgtattcgaatgatttttcaggacccctcaacgtcactgaatccacgtcaacgtatttcgcagatccttgacttccccctgcgccttaataccgatctggagccggaacagcggcgcaaacagattgtcgagacgatgcgtatggtggggctattgcccgatcacgtaagctactacccgcatatgctggcgccggggcagaaacagcgtctgggcctggcccgcgcgctgattttacgccctaaagtcattatcgcggacgaagcgctggcttcgcttgatatgtccatgcgctcgcagctcatcaatctgatgcttgaattgcaggaaaagcaaggcatctcctatatctatgtcacgcagcatatcggcatgatgaagcatattagcgatcaggtattagtgatgcatcagggggaagtggttgaacgcggcagcaccgccgatgtgctcgcctctccgctacatgagcttacccgccgtttaatcgcaggccattttggcgaggcgctgaccgctgacgcatggcgaaaggatcgctaagcgaaacaaataccctcagttcgattctctgagggtgttcatgcgactgcccaacagcaatgtttcaacctcttctaacgcaacggaaggaaataacgtgccctgggttgcccaaatgcctgccgtttttaacaccggcaaatagcgtgtgttttcctggccccccaccacgatcttgtcacaataacgccggatatgtttgacaagcagcggaaacgtcattttttcaatttgtgagacaaaaaagctgcgatcaagttttacgccgctaaaacacccgcaaactaatggcgcagcagttgcattccctacgcccaggtcgcccagccataatggattaggttgcttatgaagcgcgtgtattaaaggatcgattaaggcgttatcttgacatgaaaaatgttcagcgacctgcagctccacaaatagcatggcgtgtagtaatgcgcgaatatctttatcctgaaggacaagctgcgccataccccgatcaatatttacgatacagaataggccgtggcgtagaaaccagccatgtttggccgcgattgtccgcaacagatcaagcagaaaacggcgcttctgcgaattgtcccatgacgagataacaaactcaggatgtagcggacgagcgggcgacgatgcaaaatgggtagtgatttcgacacccagtaaatccccctccattgcccttatcggctctgccataaaaaaatagcgcatgtgaccactccacttgatcttaactccctgataatgcgcttttaacgcaaatcaatcaataaaaacgatcaatatataaaaaatgatcgaaaaaaacaatatatgttaacttcatgataacttgctaattttatgttttgagaatgttcttctattgctataaggaaatttacatactacgccgaacaacgctaatacgacggcatgagaccatccgtaaagccaggtttttcttgtcaggcagaggggaaaaatcaaggcgagttaatgttgttacaccattgcgaggcatttcacccactatggcagcgcggcatcgccaaccctagtggcgagttgcatctccgctacaggctgtccagatcccccgaacgacctttaagcgaatagcaactctcaataattgatcggtaaatctgtagcgaatgtgcccccggcgattcgcagaaaagaacggaactaaatgctatttttttaattcatcctttaataccttagccacaagagtcccttcctccggcgcggctagtttaaaacgtcttcctggcgcaggtgtctgttcttcctctccgattaacgcatcaagatccgtaataagtgacttataatattcaacatcttcagtatttccttcggtctcggcccgctttaattttatcatgtgatgggccttaatttgctcttccagttgccttgttgcaagagaaacgcttcgctgttgccgtgattcttgtgataacacgatttgatcgccatccacaaagaaaagaaccccctctttaaccagaatattacctaagatatttatatcatgcatataaaccccccgggatttaagaagcgcctccgccattcgatagttatcttcatcttcaacatcgaactcctgaccttgaatatattttgaaactaaaaccgtaacgtctttaccattaatattcatgatggccgaacgagaaaaattcttgtcgtcattggccatattcaaatacttactgacacgatcaggatgacaattacgatgctccggagagttaacatccacttttattccccgctcattaactggaatcttaacaacaaagtcatcatgtaaccgatagactgtcccataacttccgctacctattttatttttttcaatatcacgcatgcgaatatttttctgaaactccggcgagttaataaacgcctctattgccgctggttgtgatgcatccgtctgatcaatagcgccgctctcataaccagacgccgtggcgggcgtggtcaggaagtctatcaaacgttgctcaaaagcctcatagattccattactacctgcctcgctcggcggtagattatcattacccaaagcggcaagcgtaatttccccgttattataattaaacatcgtttcttttaaaaaatcgacgcaacgttcagaacactccgtctcggtcactaatactccatcgtaaaacatctgtagtagtaacatattttcttgatgtgctaatacctctacagtgtatttatctattgtttcaggtctggaggcatcaataagtttaatatatccaagaagggggcgccatcgtgtacagtcttcatctcgcttcgaaaatggtcctggagagaaaggccctttaatatcgggatgctcttttttttggcacagtagattatagatttctctataatcagaaattaaacttcgcctggtaaatatattcctgaaaaaatctataaatttctcacacgttgaaaaaacatgttctcttttattatcgatgatatctcttaaatacctttctgatatctggcaactatgatttccgatctgaaatgtaaacggcatatgtctcatcctctgaaaatttattataatacacatgcaaacatataaaaacctgatttgtaactactgtaatcacctgatttccaaaatttttcatattcagtattactctgcatcaataaatagagaaaaccttcagcacctaaaaaagaaattatttttgttaagcatttgctggttaaagttacatgtccataacatcgctaataggtgaggtaaaccatttggatgaatattcaggcttcctacagaacctttatttgtctggtggaaagcgcatcgctatcgtacttgctatccgtcccggtgtctctggttggatgaggcgaaccttacaccagctggtatactgcaccgtagggcctgtcccattagactctttgatttgccagtttggccctggggagtgctcaaaatcctcaggaacttcgttaccgtgtggttttagaacgtcacctgccggagatagcggcggaaaaatagcgtgacacacggggccaggagtgggatataatttcagactaatttcgaataatgttgaaaagttgctgttaaccattgttcgtaaaagcaaaaaataagcaatgactataaggattaaagctatgggttttctttccggtaagcgcattctggtcactggcgtggccagtaaactgtccatcgcctacggtatcgcacaggcgatgcaccgcgaaggagctgaactggcgttcacctaccagaacgacaaactgaaaggccgcgtagaagaatttgctgcccagctgggttccagcatcgttttaccgtgtgatgtcgctgaagatgccagcattgacgctatgtttgcggagctgggtaacgtttggccgaaatttgacggttttgtacactcgatcggtttcgcgcctggcgatcagctggacggcgattatgttaatgcggttacccgcgaaggctttaaagtcgctcacgatattagctcttacagctttgttgccatggcgaaagcctgccgcaccatgctgaatccgggttctgcgctgttgaccttgtcttatctgggagcggagcgcgccatcccgaactacaatgtcatgggtctggcgaaagcctctctggaagccaacgtgcgttatatggcaaacgctatgggaccggaaggggttcgcgtcaacgccatctctgcgggtccaatccgcacgctggcggcgtccggtattaaagacttccgtaaaatgctggcgcattgtgaagccgttacgccaattcgtcgcaccgtgaccattgaagatgtgggtaactcagcggcgtttctgtgttccgatctctcggcaggcatttctggcgaagtcgtccatgttgacggcgggttcagcattgcggcaatgaatgaactggaactgaagtaagcgcattaagtttattagcgggcggcacggctgtgctgccccattcccctcactcaccactcatctcgttatatagcgttctgatatttgttatcacctaacaatctttcatccctttcccgcatacgccaggataatccagcataaacgatccgacgccgaatcattatcgatcgccatttcatcctcgggaaaccctatggaacaatgccgaaaagcgggtaaaagccactggtatcatgaaacacaatccactatgtcgtcacaaaccccgctttcgctaatgccggaagccgcgtatgttaacgatcgttttttactggatttaacggtagcagaaaccgcgttgacgccttttgagtcatggttaaagcccgctcgccagttggcggatgtcttatttccccgcacggttctcaacgaccggcttcatacgtttagcgcctatgaacgtatgagcaccgcgctgaccgccgctcaggtatttggggttcagcgtttgtgtcgctattatgccgcgcgtctggcgccgctacctggccctgacgcctcaagagagagcaatcaacggctggcgcaaattacgcaatacgctcgtcagcttgccggctccccctccgttatcaatacgcgggcccgcgaacagcttgcagaggtgggattaaccgcccgggataccgtactcatcaatcagatcattgggtttatcggttttcaggcgcgggtagcggcgatatttcaggcgttttgccgtctgcccgtgcgcgaactgcccggccaggagatgcagcgctttgccagggccgcgcggtttcaaaacccccagacgatatggcggcccgccgccagtctggtagaatatcctccagcccataccaaagttcggcggcaatattcgtcttcacaatgccaaatgatggcgccggtactcatgcgcgatccgtcttcattcgcgttactcgaacgcatactgaccagcacattacacactgcatcgcccccttctttacttccacttatcacgctcctcacatcacgtatcaacggcagcgccgcctgctttaacgaacaggcaacccaacctggcgcgtggcgtcgcgctgtcatcacgttacgccaggaagacgacgacatcgctcgttgggaacttgagcctgcgctgacacaggcgatacaatggctcaccagagcgcccgatcgctttagcgccgcgcattttttcccgctactcaccaggggagtttcatcggagcaggccattaatatgttaggctggtgcggcgtgtgcggatggttaaatcgtttaaaaatcgcgttgggcgaaacctattaactcatccattactgaaagagcgcttgctgcgccaggcagaatcgcgtaaaactgtcagccgctcttttggctacgaaaatagacgaatatgtttcaggacaacccgctgctagcgcagcttaaacagcaactgcattcccagacgccgcgcgctgaaggggtcgtaaaagccacggaaaaaggctttggcttccttgaggttgacgcgcaaaaaagctatttcattcctccgccgcagatgaaaaaagtgatgcatggcgatcgtatcgtcgcggtcatccacacggaaaaagaacgtgagtctgccgagccggaagaactgatcgaaccgttcctgacgcgttttgtgggaaaagttcagggtaaaaatgaccgcctgtccatcgtgccggatcatccgttgctgaaagacgcgattccctgccgcgccgcgcgcggcgttcagcatgagttcaaagaaggtgactgggcggttgccgaaatgcgccgccatccgcttaaaggcgaccgttcgttttacgccgatttaacgcagtacatcacctttgccgacgatcactttgttccctggtgggttacgcttgcccgccacaacctggaaaaagaagcgccgaacggcgtagcgacggagatgcttgacgaagggctagagcgtcaggatctgaccgcgctgaatttcgtcactatcgatagcgccagcactgaagatatggatgacgcgctatatgctgaggaattagcggacggcagactccagcttacggtggctatcgccgatcctaccgcctggattgccgaaggcagtaagctggataacacagcgaaaattcgcgccttcaccaactacctgccgggcttcaatattcctatgctgccgcgtgagctgtctgacgatctgtgttcgctgcgcgccaacgaagtgcgtccggcgctcgcctgtcgcatgataatcgccgcggacggcaccattgacgatgatatcgccttttttgcggccaccatcgaatcgaaggccaagctggcgtacgacaatgtctccgactggctggaaaataacggcacctggcagccggataacgaaggcattgcccagcagattcgtctgttgcaccgtatttgtctaagccgcagtgagtggcgtcatcatcatgcgttagtctttaaagaccgcccggattaccgctttgtgcttggcgaaaaaggcgaagtactggatattgtggcggaaccgcgccgtatcgctaaccgtatcgtagaagagtcgatgatcgccgctaacctttgcgccgcgcgcgtactgcgcgataagctcggtttcggtatttacaacgtacatacgggcttcgatcccgcgaatgccgacgcgctggccgcgctgctgaaaacgcatggtctgcatgtcgatgccgaagaggtgctgacgctggaaggcttctgtaaactgcgtcgcgaactggatgcgcagccctccggtttccttgacagccgcattcgtcgcttccagtcttttgcggaaatcagcaccgagccggggccgcatttcggtcttggtcttgaggcttacgccacctggacctctcctatccgtaagtatggcgatatgattaaccatcgcctgctgaaagcggtcatcaagggggaagctattgcgcgtccgcaggaagatatcacccaacaaatggcggaacgccgtcgcctgaaccgcatggcggagcgcgatgtcggcgactggttatatgcacgcttccttaacgataaggcggggacaaatacccgtttcgcggcagaaattattgacgtcagccgcggtggtatgcgcgtgcgactggtcgataacggcgctatcgcctttatccctgccccgttcctgcacgccgttcgcgatgaactggtatgcagccaggaaaacggtacggtacagattaaaggtgagacggtttataaagtgacggatgtcattgatgtcactattgcggaagttcgcatggaaacccgcagcattattgcccgaccggcagcgtaaccacgcttagctcactcaacggcctttgctgagaaggcaaaggccgtttcttttcttcttctcccttccgtcatgctctaagtttaatcttattcaagcgccccatttcttgttatttttagctggcgactatgctttttccagaatctggattacatatgaatacatagataaaacaatacgttcagccataattacccttatttataacatggctaacctttcttttcgggcacctggcgcttaaatgggatggtacgcatgatgaaacagattcaggaacaaacggcgctaaatccccttcactctcactggcgtctggctgatgaccgcaacgtgctgtatctctccccgacaggtgaaacggatgcagaaaaaacggttgagctatcgccggaacaagccgggcgtatccgggaaataacggcgattacgtccagtctgctgataacgttgttgatagaaaaacaggttaccgctgtgcacctggtaggccgtaagattaataaccgtgaatgggctggcagcctggcaacctggcctgatacgcctgccgtctcgccaacgcaggcgcaggagctctcttttgccgagcaaatcgtatcagaagccaactcagtcattgcgatactggatagtcggggaaaaatctgtcgatttaatcggttatgcgaagagtacacaggcttaaaagagcgagatgtaattggtcaaagcgtctttaaattatttatgagccgccgggaggcggttgcctcccgacactacattgagaatttttttcgcaatggcaatgcctatgaaatcgaacgctggataaagacccgtaaaggccaacgcctgttcttatttcgtaataaattcgtccataacggtagcggaaaaaacgaaattttcctgatctgcgcaggcacggatatcaccgaagaaaggcgggctcaggagcgtttacgcatactggcgaatacagacaccgtcaccggcctgcccaatcgcaatgctattcatgaatttattaatcatgctattgcctcggctggcgagtcgcaggtgggtatcgtttatctcgatctggataacttcaagaaaattaatgacgcctatgggcatatgtttggcgatcagctcttacaggccgtttcgctggcgctgttgagttgtctggaggaagatcaattgctggccagactggggggagatgaattcattgtcctcgctgcccatacgtctcaggccgcgctggaagcagtagcctcacgaatccttacccgtctgcggcaaccgtttcgtattggactcattgaagtttacacgggatgcgccattggcatttcgttggccccccggcacggacaggacagcgaaagtctcattcgcactgccgacaccgcaatgtataacgccaaagaaggcggccgcggtcagttctgcgttttttcgccggaaatgaatcagcgcgtatttgactatcactggctggatacaaacctgcgaaaagcgctggaaaacgaccagttacttattcactatcagcccaaaattacctggcgcggcgaagtacgtagcctggaagcgctggtacgctggcaatcgccggaacgcggattaattccgccgctggagttcatctcatacgccgaagagtcaggactcatcgtcccgctgggccgctgggtgattctggatgtagttcgccagattgcgaaatggcgcgataaggggattaacttgcgcgtagccgttaacttttcggcgcgacaactggccgaccagacgctttttactgcgcttaaacaggctttgtacgatctgaattttgagtattgcccgatcgatgtcgagctaacggaaagctgcctgatcgaaaacgacacgctggcgctatcggttatccagcaatttagtcagctcggcgcccagattcatctggatgattttggcacagggtattcttcgctttctcaactcgcccggttccctattgatgccgttaaactggatcaggctttcgtcagagatatccataagcaaccgctgtcgcaatctctggttagggcgattgtcgcggtggctcaggcgctaaatttacaagtgattgccgaaggtgtagaaaatgctaaagaagatgccttcctgacaaaaaacggcgtcaatgaacgacagggctttttattcgccaaacctatgcccgccgtttcttttgaacgctggtacaaacgttatcagacgaaaaaaatgcgttaatggcgacgataatagggagaacagcctgtgcagacaggcatagccctatttttcccttctcttttcagattaatttctgcatcatgaattgaaaccttttctgacattaaggatgacaaacatgtctgatatcgaagcacaacgaattgccgcacgcattgataccgtgctggatatccttgttgctggcgattaccactcggccatcaataaccttgaaatattgagagcagagctgttagatcaggttaaagacggtatctcgccatcccaggctcccgggtcgccctgggaaatctgatagcgattatttgtccgggatggccgttagcccttcccggctctctgactgtctgttgactcctcttaacgaataaaattaatactatgaactcccgacaacaatcaattttgcaaatggtggttgataaaggccagatgagcgttgctgaactggcgaaaattaccggcgtatctgaagtcacgattcgtcaggatctgaataccctggaaaagcagagctatttacgccgtgcgcacggtttcgccgtttcgcttgagagcgatgacgtagagactcgcatgatgacgaactacacgctaaaacgccgactggcggagttcgccgcctcgctggtcagtccaggggaatccgtttttattgaaaatggcagcagcaatgcgctattggcccggacgctggcggaacaaaaagatgtcacgatcatcaccgtgagcagttatatcgcgcacctgctcaaagagaccccttgcgaagtcattctcctcggtggaatctatcagaaaaaaagtgaaagcatggtagggccgttgacgcgacagtttatccatcaagtgcatttcagcaaagcatttatcggtattgatggctggcaggctgataccggttttaccggacgcgacatgatgcgatcggatgtggttaacgctgttctggaaaaaggctcagaagcgattgtcctcaccgacagctccaaatttggctgtgtgcatccctatcccctgggcccgctctctcgcttccatcgtgtcattacggattccaaaatttccgccagcgatcaaatgcagttagaacatgcggggctgctagtcaatgttattggctcatccgtttaaaatatttcccgatggtttgccctatggcaaatcatcctctctctaagacttttctgacatcccaattaagactatttacctgttgtaacgagcgtaacgtcgtaaaattaatattagcgaaataacaggaagtgactatcacctgcgtgatatacccctgcgcaatcaggttttacggaaaatctcttaacaggttttattttaactatagttatagtgagcttaattccgtgaatcgttaattcaggagagagtattatgtttatgacgagcaaaaaaatggccgctgctgtgctggcaatcaccgtagcaatgtctctgagcgcctgctcaaactggtccaagcgcgatcgcaacacggctattggcgcaggtgcgggggcgttaggcggcgcagtgttaacggacggcagtacattaggcaccctgggcggcgcggcggtcggcggcgtgattggtcaccaggttggaaaataatccagacgtttaaatattgaacggctcaaaataatacgtttattcttttcaggtctggattacaaaaatagacaaagttgacttttacgccacggtaatttacaaccgtggcgttttcattagccgccagctaattttactttcattcctttagcttccagcaatgattttatcaagtcgcgtttatcaccctgaatttcaataatcccttcttttactgccccgccacagccgcattttttcttcagttcagccgccagtttggttaattccgcatcattcatctcgataccggtaatcaaacatacgcctttacccttacggccactggtttgacgctgaatgcgaacgataccatcccctttgggacgaaccggcgccgttttaggttcttcaatgcgccccgtctgcgttgaataaaccagacgactattggaatcgctcattatgcctcccgtttcagtgacgcgttaatatccttcagcgtttgcgccggatctaccgattgcgtaaccgggcggccaatcaccatatagtcaacgccagcggataatgcctgttcgggcgtcataatgcgtcgctggtcgcctgcctcgctgcctgcgggccgaatgcccggcgtcactagcttaaatgcagcgccaaaggcctgtttaaatctgacagcttcctgagcggaacagaccacgccatccagcccgcattgctgcgtcaggcgcgccagccgctccgcatgttccgccggtgacaacgtcacgcccagatcgtgtagatcgctggtttccatactggtcaacacggtcacggcaatgagcaacggcgcatctttactgaatggcgccagcgcgtcgcgcgctgcggccatcattctcgccccgccagacgcgtgaacgtttaccatccagacgcccaggtctgccgcagcggcgaccgcccgggccgtggtgttgggaatatcatgaaattttagatcaagaaagacatcaaacccacgttgctggagatcccgaacgagctgtggaccaaacagcgtgaacatctctttgcccacttttaagcgacaatcgcgaggatcgattttatcgacaaacgccagggctttatcgcgttcatggtaatccaacgccacaacgacaggcgattcagtaatagcgcaggaagaagatgaagcagtaaacgtcatgaccagaccttcttgatgatgggcaccggaagtggcgcaaattggataaacggcgtgcattctacctgcggcgcagggaaattaacaggttcgattgacaacctgataagccctggtcgccgatgctagcgtcgtttcttgttttatgtcattaagtatgttgtaactaaagcgaggctttttttatatactactgcccatcaagtccgcgaataggtttaatggtcgaccatgcccggcaggacggacagtgccagtacaaggtataggcggtaaaaccgcatttctgacaacgataccgcggtttactgcgcacctgctcgccaaccatatcacgcagtaccatcaggctttctttcgctcgcccttcttccgcctcgttgagatggtaatccatcagcttatggaacacccgcatggtaggatgtcgctgtagctgacgcgtgatatagacttgagctgcgtcactaccttcacgtgcttccagaatatcggcaagcattaactcagcgccagcaccggtattctcctcaacggcgcgacgtaaaaactccgcccactcggcatttttaccgagctgttgataacaggtttgcagcatctccagcgtttcgctgaccagctctttatcctgaacgatcacacgttgcaggctttcgaccgctttggcgtaatcccctctcgccatataaacgcgccccatcatgatagacacccgggcgctatttttatctgcggcggcaccttttttcagcaacgccatcgcgcgatccatgtcgtcgttgcccatctgctgtaacgctaactcacagtaaaagtgggcgatttcgatacgctgtttatctttgcccagtttcaccagccgttctgctacttcgatcgccttttgccagtcgctggttagctgatagatttgcaagagctgctgtaacgcgcctacgcgaaattccgtttcgtcggtaagttggttaaacatatcttccgcgcggtcatataaaccggcggccatatagtcgcgccccagttgctgaacagccagtaaacgctgttcataggtcaatgaagcgctttccatgagcgtttgatgaatacgaatggcgcgatcgacttcgccgcgtgagcgaaacagattaccgagagtgagatgagcctcaacggtgcccgtatcctctttaagcatatcgaggaacagatccaccgctttatcttgttggttactcagcaggaagttaacccctgcgacataatcgcgcgacaggcggttagcttcatcctgttttgtttgttgcgcacttctgcggcccatataccacccataggcagcggctacaggcaacaacagaaataacaactccaacataaatgattattcctttacaaccgacgaatcggcagggaccgcaacgtcggttgctggcgagagcttgttttccagtcgtttaattttacgttcagcgcgggcaagggaaacgcggacccgcagccagaacaggccgcaaatcagccagccaatcgcaaaaccgacggcgaacagcacagcaagcaacgtggagatacgatactccccttgcgccagcaggtagttaaacgtcacctgttgatcattctgcgcgcccagcgtcaccgaaataacaaaaatcgccaataccagtaagaaaatgagtaaatatttcacattacttcccgttatgtggtttgcgcgaataaatcgtgtccaacttaccgcatccagccttctaaattaccattttcccgcctcgcgcgaaatggaaatgcgcccaccatcagatgatttaagggcaatagtcagaaaatcaaccgttgtcagctttcctgctcgcgttcagcaatttcttgcgcttcttcgcgaggcggcataagcggcccgcaaattcgctgcgccagccaggtcgccagggtaactaatagccaggagatgagcgtggcgaccactaaatctcgcggccagtgcattcccagaagcaaacggctgcccattacgccggtcgcccagactaacaaaaacgcgatggtgaaagtccgtctgcgcggccataacagacccacggccaaaagcgcccagctcgctgcaaacatggtgtgtccggagggaaacgcaaagcccgtctctttttgccagtgctgacgcaggaaaacggggatgttctgttgcccggccaactgctctttcactaaatgtccgcgttctgtacgctttaaagtgtagaactcatcgacgggaatatggtgcgttttttcaagccagaccacaaatggccgcggctcctgtacgcgctcctttacccatgacttcacgccctgcccgacgataatcgccccaccgagaatcgcaaacagcataatggcggcgcgcaggcgaaatcgcaggcaccataagaaccatccacaaagaatcacatgcgtgataacgccccagggtttggtcacggtttccgttatccagaatagcgtttttagccaccagacctgatgtcctggctgccactgccagcctgatacccatacggcaagcggcatgataagcaacagggcggcgcctgccgcggtgcgcctcgcaattgaaagcatggatgctccttttataagtaagtatcacaatcataactgaaaattctcgccggactggaaaattgacaaatttgtgccattcctgagcaattacgtggtagtgattaggtgatgtccgccgccttatggcaaaatagcgggatacaagccaacaggcgacgacaccgcaggcgtcagcataatctggagaaatacatgcagcttaaacgtgtggcagaagccaaactgccaaccccattgggtgactttctgatggtgggatttgaagaactggcaaccggacacgaccatgccgcgctggtttttggcgatatttcaggtaaaacgccggtactggctcgcgttcattccgaatgtcttaccggggacgcgctttttagtctgcgctgtgattgtggttttcaactggaagccgcgctgacgcatattgcggaagaaggacgcggtattctgatttaccaccgtcaggaaggccgcaatatcggcctgcttaataaaattcgcgcttatgcgttacaggatcaaggctatgacacggtggaggccaatcatcagctcggctttgccgccgatgagcgtgatttcaccctttgcgcggatatgttcaaattactcggcgtggatgaagttcgcctgctgaccaataatccgaagaaagtcgaaatactgaccgaggcgggaattaatatcgtggaacgcgttccgctcattgtgggtcgtaatccaaataatgagcattatctcgatactaaagcggccaaaatgggccacctactaagtaagtaagccaccggtattaaagcgcgggcctgcctgtttacggcaggcccgataaacggctttagttcagcatatttctaatgacatagtgcaagatgccgtcattctggtagtaagtcagctcggtggcggtatcaatgcgacagcggcaaggcaccgtttctttgctgccgtccgatctcgttaacgtcaccggaatggtcgcgccagggcgcaggttttgcagatccgcgatatcaatcacctcttccccggtcagtccaagcgttttacgcgttacgccctgtggaaactccagcggcaggatccccatcccaatcaggtttgagcggtggatacgttcgaacgactcggcgatcaccacgcggatacctaacagccgcggaccttttgccgcccagtcacggctcgatcccgacccatactctttcccggcaattaccgccagcggcgttttttcctgctggtagagcatcgcagcatcataaatcgacatcgcttccgtacccggtaaatgccgcgtcatgccaccttcgacgccgggcagcatttcgttgcgaatacgaatattggcgaacgtaccgcgcatcatcacttcatggttgccgcgccgtgatccataggagttaaaatccttccgctcaacgccgtggttttgcagatagcgtccggcgggactgtccggcttgatactgccggccggggaaatatggtcggtcgtcaccgaatcgcccagcatcgccaggatacgcgcgccgtggatatctttgactggcgcaggctgggcctgcatttcatcaaagaaaggcgacaggcgaatataggttgaatccgactgccagccgtaggtatcggacgattcaacctgaatcgatttccattcttccgtgccctcaaacacttccgcatactctttacggaacatatctgatgataccagttcaacggcgcgggcaatttcctgcgccgaaggccagatatccttcaggtataccggatcgcctttacgatcgtaccccagcgggtctgtcgcgaggttaatattcatgtttccggccagcgcatacgcgaccaccagcggcggcgacgccagccagttcgttttcaccagcggatggatacgcccttcaaaatttcggttaccggaaagcacggcccctaccgtcagatcgccttttttaatcgcggtctcaataggctccggcaacggaccggagttcccgatacaggtcgtacagccataaccgaccaggttaaaaccgagctcatccagataaggcgtaagtttggcctgcgccagatagtcagataccacttttgaccccggcgccagagaagccttgacccacggttgacgcttcaaccccagcgttactgcctttttcgccagtaatcccgccgccatcagcacgctggggttcgaggtattcgtacaggaggtgatggcggcaatgacgacagcgccatccggaagctgatatggctgtccgttcatcgtatagtcaaccggctggcgatctctttgcgcggtattcagctccagctcggcgctggcggcaaaggctttcggcacatcgcctaacgccacgcgatcctgcgggcgtttcggcccggccaggctggcctcgacatcgcccatatccagttccagcgtactggtaaataccggttcgtcaccgggattacgccacattccctgcgccttcgcgtaggtttcaaccagctcgaccagatcgtcgctacgtccgcttaatcgcatatattccagggtgatggcgtcaatggggaagaaaccacaggtggcgccatattccggcgacatattagcgatagtcgcgcgatccgccaacggcagcgaatccagaccgtcaccataaaattcaacaaatttacccacgacgccatgcttacgcagcatttgcgtgacggtgagcaccaggtcagtggcggtgatcccctcccgaagcttaccggttaacttaaagccgacgacatccgggataagcatcgacacgggctgaccaagcatcgccgcttccgcttcaataccacccacaccccaccccaatacgcccagaccattaatcatggtcgtatgggagtcagtccccaccagcgagtccgggtaagcaatccactccccgtcctgtaattcgctccagacggctttacccaggtattccaggttaacctgatggcaaatgccggtgccgggcggcaccacgctgaaacggctgaatgcctgctttccccatttcaggaacatataacgctcatggttacgttccatttccagccgcacgttttcttcaaacgcatcatcatcgccgaaatgatcgaccgtcacagagtggtcaataaccagatcaaccggcgataacgggttcactttcgacgtatcgccgccgaggcgtttaacggcttcacgcatcgctgccaggtcgacaacggcaggcacgccggtaaagtcctgcatcaggacacgggcgggccgccaggcaatttcacgatcggcatgggcatttttaagccaaccggccagcgcctgaatatcttcatcagtcacagattcgccgtcctgccagcgcaacaggttttccagtaacactttaagtgatttgggcaaacgggcgatatcgcccagggatttggcagccagcggcagactgtagtaatgatacgttttatctttggcctgcaatgtatccttactggcttctcgtagggttgacgacatagctcctccttaaatgacagggttgcgttaccctgattctccacagggttgtattaaagataacacaaacaaaatgtaacgttttgataacaacccaaattgctaaaagaggagaaacctaacaggcgagaagcgaagatgaaaaagcccgataaataacgcattatcgggctttgacgagattagacggcaatccagattaactcggcccagaacagtagcgataatataaacgcgccagtccatgaccaatactttatatttgacgttaacataggcgacaccaactgtgtttaatcaatactgagaggcgctcagcacacggttgctgcggtgtaataagacagcgttaataaaacagtaacgccaataaaaagacgaatattatttttgtgacacctcgtcagcaaaagcatcaataaatgcccgctgctgcggtgtgggcgtccagtgttgcggaacagaccgaaaaacggtcgtatccggggtgttatcatcgtcaccagattgaatcgggggcgcgaccacgcgctcgcgttccgacgtaatgctcacttagccccaccaatgccagataacaagcgctaccactacccagaacaacgcagaacccacaaaaaccgccagccatgctttacgtttgagctcagggtcgcggcgcggttcctggttttcagaaggcattactaacctcatgctatcggtatcacttatcatttcagcaccaaacaatcggtacaattaatcatcagatgagacaaatcctaaataaactttagtcaaaaatccagtcaatttacgaatcgttgccagtgaataaatcaatcttttgactcaagataactatttggaaaaagaaactggcgggacgggtaattcaacactattttgctgatcattacccgtaatacttcgagggatattgcaaaaggcggctttgtctgccatgccactacgacacaaaccgacggtgatattacttttcaggcagctttatatcctgaaacatcgcttcaatttcttcattagaacgcaacgccaccgccgtatccaccacatcacgcgtcagatgtggcgcaaaacgctggataaaatcatacatatagctgcgtaaaaaagtactacggcgaaaaccaatttttgtggtgctgtggctaaaaatatcgtgcgcgtcaatccgcactaaatcaggatcggcaagcggatcgaccgccatgctggcaatgacgccaacgcccagtcccaacctgacatacgttttaatcacatccgcatcggttgcagtaaagacgatccgcggcgttaatcctgcgcgattaaaagcggtatccagttcggaacgcccggtaaagccgaaggtatacgtcaccagcggatactgcgccagcgcttcgatcgttacggaagacgttgccgccaatggatgatccggcgtcaccactatcgaacggttccagtgatagcatggcaacatcaccagatcgtcatataaatgcagcgcttccgtggcaatcgcgaaatcggcgttccctttcgataccgcttccgcaatctgcgttggcgacccctggtgcatatgcagcgaaacgcgcgggtaacgctcgatgaagcctttaatcacgcctggcaatgcataacgcgcctgagtatgggtagtggcaatatagagcgagcctttatccggccaggtgtgctcgccggcgaccgacttaatggcatcgactttggaaagcacctcacgcgcaatacgaataatctcctgacctgcgggcgtcacctgagtcagatgcttaccactgcgggcgaaaatctggatgccaagctcatcttccagcatccgaacctgcttgctgatccccggctgggaagtatacaacccctcagcggtagaggagacgttaaggttatgattaaccacttcaacaatgtaacgaagctgctgcaatttcataatacatcatccagattagcgccatcaggccatcgtttatctgcagacttaatcgggctgctaatacgatttaataataaaaaaggtgttaactataaccactatatcatttatatctgaactgtatagccagcgcgataaaataataagcccgctatacccaaaataattcgagttgcttaaaggcggcaagggagtgagttcccagaagcatagataacgatgtgactggggtgagcgacaaatctgccgggagcagatttgaacgtcgcgtgcgacggcccgtcagggcgagcccatggatgggccgagtaatccgtagccaacacataagccactttaaatatgaaggggatataaaaaagggccgcttacgcggcccgcttgactatagtgacgacaggcaggggttatttcttgccttcaacccacttgccgtcgacgaagaacgctgaccatcccgtcgccttcccgtctttttccgccgcaacgtactgctgttttgttttgcggctaaagcgaacaacggttttattaccttccgggtcctgctgcggcgcatccgccagataacgcagtttttccggcaggcgatcgcggaaccggtacagctcctcgactaatggcgcgcgagtttcgcgtgatttcgggaacgtattggccgccaggaatatccctgcggcgccatcgcgcagcacaaagtacgcgtccgatttttcacacggcagttccggtaatggaacaggatcttccttcggcggcgcaacttcgccgttacgcaagatcttacgggtatttttacattcgtcgttagtacaggccatgtacttaccaaaacgccccattttcaggtgcatttcggaaccacatttctcacactcaacgatcgggccgtcataccctttgatgcgaaactcgccttcttcaatctcgtagccgtcacaggtcgggttattaccacacacatgcaatttacgcttcggatcgatcagatagctgtccatcgccgtaccgcacttctgacagcgccgcttggcgcgcagggcgttggtttcggcgtcgtcgccttccagcacgttcagaacttcattttccggcaccaggttaatggtcgttttacaacgctctttcggcgaaagcgcataacctgaacaaccaaggaaaacccccgtactggcagtacgaattcccattttacggccacaggttggacagtcgatgctggtcagcaccatctggttaggacgcatccccccttcttccggatctttctcggctttatcgagctgctgagtaaaatcgctgaagaagttatccagtaccgctttccactcggcctggtgattcgcaacctgatccagactatcttccatctgcgcggtaaaatcgtagttcatcaattcgcggaagttttcttccagccggtcggtgacgatttcacccattttttccgcatagaagcgacggttttcaacgcgaacatagccgcgatcctgaatggtcgagataatcgacgcataggtagacggacgaccaataccacgcttctcaagttctttaaccagagaagcctcgctgaaacgggctggcggtttagtaaagtgctgagcaggcgtcaattcaagtagcgtcagcgcatcgcccttattcacggcaggcaatgtgcgatcttcatcgcctttacgcagcgccggcatcacttttgtccagccgtcaaagcgcaaaatacgcccacgcgctttcagacggaattcgcctgcgccaacggtaagcgtagtggagtcatattgtgctggcgtcatctgacaggcgacaaactgacgccaaattagctgatacaacttctgcgcgtcagcctccatgtctttcagagactccgccatgacagcaacgtcggaaggacggatcgcttcgtgcgcttcctgagagttttctttgctggcgtactggttcgggttatccggcaggtatttcttgccgaaattatcgccaatataaccgcgcaccatgttgaccgcatcctgactcaggttggtggagtcggtacgcatataggtgatgtagcccgcctcatacagacgctgcgccatcatcatggttttcttcacgccaaagcccagccgggtgctggccgcctgttgtagcgtggaggtgataaacggcgcgccaggtttgctgctggtcggtttgtcttcacgctccagtacgctatagcgcgctttttccagcaagctgacggcggcaagcgtctgctcgcgatttaccggccggaatggcttgtcgttctgatgcgtcacctgtagcggtagtgcctcgccagacggcgtcgtcgtattagcgtcaatttcccagaactcttccggaacaaacgctttaatctcgcgctcgcgttcaacgaccagacggaccgcgacagactgaacgcgacctgccgacaaaccacgggcgatctttttccacagcagcggcgagaccatatagcctaccacgcgatccataaagcggcgcgcttgctgggcgttgaccctgttaatgttcagctcgcccggctgttcaaacgcctggcgaatggcatttttggttatttcgttaaagactacgcgactgtagcgcgcgtcatcgccgccgatcacttcccgcaggtgccatgcaatggcttccccttcgcggtcaaggtcggttgcgagatagatgtggtcggctttttccgccaactgtttcagttcagagacgaccttctctttaccgggcagcacttcatagtgcgcatcccagttgtgccacgggtcaacccccatacggttgacgagagcgccacgttcatcctttttgggctttttagccgttttggtggaggtagagtcggcgctctttttagctgctgagccactggtcggcaaatcacggatatgacccacgctggatttcaccacgtagtcattacccagatacttgttgatcgttttggcttttgccggggactcaacgatgacaagagctttacccatattcacctttacctaagttgattcttccaggaatgcgtcgcacgttgattcaccttccactggcgacgagacaacgatatatggtctctgcgtctgcggatatcaaccccttgtactggctttgtgtacgaaatgtaaccctcaggtgactgagttaacaggcttttttgcacacacgcgctatagcacgacggaattttggtcgaatgtcaagcaattctgttgccagattgacgaaagcgtcacactgtacctgataaaattcgatacgcaactttattagcatgcaaaaacaaatcttgccagtgaacgcaacatgacaaatccatcaatttcctgtgagaatatttgcccatcagaagtgctcagcgtagactaatctccttgtttaaggagtaaaaaatgcataaagagacgcaacctatcgatcgcgaaacactgttgcttgaagccaacaaaattattcgggaacatgaagacacgatggcaggtattgtcgccaccggcgtaacgcagagaaatggcgtgctggttttcagcggcgattactttttagacgagcaagggttaccgacccctaaaagcaccgcggtgtttaacatgtttaaacacctggcgcatgtgctgtctgagaagtatcacctggttgattaatccatgccggatggcgctgaatgccatccggcaatagcggtttacatcaacggcttttgtccacgctgccaccagcgcagcagcagccgatccgcgctttccgccgcgctgccggtaacacgatcgatcagttttttacgctgcatatagcgcacattcagcacctcgcgcccttccatcaggccgaggataacctcatcgctggtgttaatctcatcaaccagtcccttctccagcgcctgctgaccgtaccagtgttcgcccgtggcgacctgttcaatgtccagagccggacgcatccgctgcacaaactctttgaacagatggtgcgtttcgttgagatcttcacgaaacttctgccgcccttcttccgtattctcgcctaacaaagtcagggtacgtttgtactgccctgcggtatgcagttcaatatcaatgtctttacttttgagaaagcggttaaagttcgggatttgcgcgacaacaccaattgaccccacaatagcaaacggcgccgcgataattttttccgccacgcaggccatcatatagcctccgcttgccgcgactttatccaccgtcacggtcagcggaatatttttatcgcgcaggcgctgcaattgcgatgccgccaggccatagccgtgcacaacgccaccggggctttccagacgcacaaccgcccgatcgccgggtttcgccactgccagcaccgccgtgacctcttcgcgtaacgcattaacttcgtgagcgtccatactgcctttgaaatctatcacccatacgcgcggtttgtccgatgtcgcaatgtcccccagcttcgctttcgctttggcggctttcgcctcctgcttatgcttttttttctgcgctttatgccacagtttttgctgatggccatccatcaacgccgcagcaaggtcatccttcatctcctgatactgctcactcaaattggtcacgcgcagctcgccgcgctgacgtttgcgttgcgtagcattcacgatcagcagcacaatgacggcaatggccaccacaacggtgacgatttttgccaaaaataagccatattcagacaacaattccacgactcccaccttgattaaataacgcgacttgcgctcagtgtacaacaggcatcgaagtcagtctctcttcatccgtatgcctgttgaggaagaaaaagtatgacaagacgttcattttacggcgttatcgcccctgtctgattgaaaaaaaaggcgctttcaggcataaacccgaaaagttaacgcgaagataagacaacctggcaggacggtgcaccacaccgttgaggagtagccatgcattaccaaccgaaacaagatctattgcaaaaccgcattattctggtcactggcgccagcgatggcattgggcgggaagccgcgctcacgtatgcgcgttacggcgcaacggtgattctgctgggacgcaacgaagagaaactgcgtcgggtcgcgcagcacattgctgacgagcaacatgttcaaccacagtggtttacgctcgatctgctgacctgcaccgctgaagagtgccggcaagtggccgaccgcatcgccgcgcactatccccgcctggatggcgtcctgcacaatgccgggttactgggggaaatcggcccaatgagcgaacaagatccgcagatctggcaggatgtcatgcaggtaaacgttaacgccacctttatgctcacccaggcgctgttaccgttattattgaagtccgatgccggctcgctggtctttacgtcatcaagcgttggccgtcagggacgcgccaactggggcgcctatgccacctcgaagtttgctactgaaggaatgatgcaggtgctggcggacgaataccagaaccgttctctgcgtgttaactgcattaacccgggcggcacgcgcaccagtatgcgcgccagcgcctttccgacggaagatccacagaaattaaaaacgcctgccgatattatgccgctttacctgtggcttatgggcgacgacagtcgccgtaaaaccggtatgacctttgacgcccaaccgggccgtaaaccaggaatcgcccaatgagtgatgaacgttatcagcagcgccagcagaaggtaaaagatcgggttgacgcccgtgtcgcccaggcacaggaagagcgcggtattattatcgtgtttactggcaatggtaagggcaaaaccacggcggctttcggaactgccgcccgcgccgtaggacacggtaaaaacgtaggcgtggtgcaatttattaagggcacctggcccaacggcgagcgtaatctgctggaaccgcatggcgtcgaatttcaggtgatggcaacgggatttacctgggagacgcaaaatcgcgaggcagacaccgcagcatgtatggccgtttggcagcatgggaaacggatgctggccgatccgctgcttgatatggtagtactggatgagctgacctatatggtggcgtatgactatttaccgctggaagaggtcataagcgcgctaaacgcgcgccctggtcaccagacggtgattattacaggtcgcggctgtcaccgggatattcttgatcttgcggataccgtcagcgaactgcgtccggttaaacatgcttttgacgcgggcgtaaaagcccagatgggaattgattattaaccgtaggccggattaaggcgtttgcgccgccatccggcacaaaccctcttgtctgatgatcctcggcctatagaccgcggtagagattacccgttgttattacgcccaccggagcggcgtccgccagctatctggctgtggcgttttaccgcccgacggatctggttcgctttcatacgacgacggtctttttcgacggcaaccttcgacgaggtttccggcgggagctctaccagaccacgcagatagttcgtttgcgcgaggtcgagctcagtccagccgccgcgcggcaggcctttcggcagcgggatatcgccgtaacgaacgcggatcagacggctgacctgaacgcctaccgcttcccacagtcggcgaacttcgcggttgcgcccttccgtcagcgtcacgttataccactggttaatgccttcgccgccgctgaatttaatggtcttaaatgccgccgggccatcttccaactgtacgccacggcttaaatcacgcagtttcgattcatccacctgaccgaacacgcgcacggcatattcacgttcaacttcgcgactaggatgcatcaggcggttcgccagttcaccgtcggtggtaaacaacaatagcccgcaggtgttgacatccagacgtcctaccgcaatccaccgcgcgccgcgcagtttcggtaagcgatcaaaaacggttggccgcccttcagggtcattgcgggtacacagttcaccttctggtttgtaataggccagaacgcggcaaatttgttccgccgactctttcaccgaaatcaggtgaccgtcgatacggattttcaaaccgggagtgacttcaacacgatcgccaagcgtggcgattttaccgtcaacgctgacacgtcccgcttcaataatggattcgatttcacggcgagagccgtggccagcgcgcgccagcactttttgtaacttttcgctcatagagcttccttcaggtgtcgccttcacaggcgtcgaacaggagaatgaacggcgcgttgccgcgccattttaaggccgcgtagtatacaggcttacgcccttataagaaaggtgtaacgtcgccgacgccttcgcgcagcaccaccggggagtcattggtcaaatcgattaccgtggtaggctgttgaccgaggtaaccaccgtggatgatcagatccacctgcttctccagccgatctttaatctcctccgggtccgactcggtaaaatcgctgccaggcagcatcaacgacgtcgagagcatcggttcgcccagcgtatccaataacgccaacgcaatcgggtttgacggtacgcgcaggccgatagttttacgcttttcctgcaacagacggcgcggcacctcttttgtccccttcaggataaaggtgtaattacccggcgtattgtttttcatcagacgaaatgccacgttgtcgacgtaggagtaggtcgacaactcggacaaatcgcggcacatcagcgtgaagttgtggccgtccggcagatgacggatgcggcaaatgcgctccattgcgcctttgtcttcaattttacaaccaagggcatagccggaatcggttggataaacaataacaccgcctttacgcacaatgtcgacggcctgattaatcagccgttgctgtgggttatccggatggatataaaaaaactggctcatacttccctcactgtgatatttgcggctgttcccatgtctgccatacgccttcaacgccagcgggcagccagagtttacgccccaactcaatccacgggcagggctgatggaaatcagatccaagcgatgcccataaatgatgctgacgcgcaagcgtcgccagttgggtgcgttcattgggcgattgttggcactgcgccacttccatcgcgtcgccgtgatggtcggcaaaatgcgccactaatcttttcagccacttagcgctaaggtcgtagcgtcccggatgggccaacaccgccttaccgccagaatgatgaatgacatcaatagcttgttctattgtacaccactgcggcggaacgtaaccggttttcccacgcgcgagatattttttaaaaacatccgccatggtcgcggctttgccgcactccaccagaaagcgggcgaagtggccgcgcgtcaccgcgccgccattggccagtctcaatgccccttcccacgcgccgggaatatgggctttttccagacgctccgcaatgagccgaccgcgtgcctgacgccgctctgtctgctgcgccagaaaatcgcgcattgccggatgcgcaatatcaatattcagacccacaatgtgaatctcatgattctcccagaccgttgaaatctccacgccgggaataagattcagggccagtccggaacgtgaaatttcttctcttgccgcaggaatcgcggctgtggtgtcatgatcggtaatcgccagcgtgccgactcgcatctctaccgcacggtgtactaatgtttctggcgtcaacagtccatcggacgccgtggtatgactgtgcagatcgtaaatcactgcgtaattcgtgtcgctcaaggcggctcccatagagataaagttatgtcatgtacatcataacggttccggcaaatatactgaaataggtgttgacattattccatcgaactagttaactagtacgaaagttcacatgaagagggtatctaaaatggcagcgacatttgcattacacggttggtggcgcacttcctgatagcgggcggtgtatgaacagctgtaatcagccaaacgatacccggcccgcctgttaagcgggcttttttttgaacaaaataatgagaataaccatgcaaacaccaaaacccacgctcgaactgttgacctgcgatgccgcctatcgggaaaacccaacggcgctttttcaccaggtctgcggcgatcgcccggcaacgctgctgctggaatccgcggatatcgacagtaaagatgatttaaaaagcctgctgctggtagatagcgcgctgcgcattaccgctttaggtgacactgtcaccattcaggcgttatctgataatggcgcctcgttattgccgctactggataccgccctgcccgctggcgtggagaacgatgtcctgcctgccggtcgcgttctacgcttcccgcccgtcagcccattattagatgaagacgcccgtttatgctctctgtcggtatttgatgcgttccgtctgttacagggagtggtgaacataccgacgcaagagcgggaggctatgtttttcggcggtctgtttgcctacgacctggtcgctggctttgaagcgctgccacaccttgaggctggcaataactgcccggactactgcttttatttagcggaaacgctgatggttatagatcatcagcaaaaaagcacccgtattcaggccagtctgttcaccgccagcgaccgggaaaaacagcgcctcaacgcccgcctggcgtaccttagccaacagttaacccagcctgcgccgccgttgccggtgacgccggtgccggacatgcgctgtgaatgcaatcagagcgatgacgcgttcggcgcggtggtacgccagttgcaaaaagccatccgcgcgggcgagatatttcaggtggtgccgtcgcgccgcttttcactgccctgcccgtcgccgttggctgcctactacgtgctgaaaaagagcaaccccagcccgtatatgttctttatgcaggataatgatttcacgcttttcggcgcgtcgccggaaagctcgctgaaatatgacgcagccagccgtcagattgagatttatcccatcgcgggtacccgtccacgcggtcgccgcgccgatggtacgctggacagagatctcgacagccgtattgagctggacatgcgtaccgaccataaagagctttccgaacatctgatgctggtcgatctggcgcgcaatgacctggcgcgcatctgtacgccgggcagtcgctacgttgccgatctgacaaaagttgaccgctattcatacgtgatgcatctggtttcccgggtggtgggcgaactgcgtcacgatctcgacgcgctgcacgcctatcgcgcctgcatgaacatgggcaccctgagcggcgcgccgaaagtacgcgccatgcagttgattgccgatgcggaaggacagcgccgcggcagctatggcggcgcggtcggttacttcaccgcccacggcgatctggacacctgtattgttatccgttccgcgctggtggagaacggtatcgccaccgtacaggcgggtgccggaattgtgctggactctgttccgcagtctgaagccgatgaaacccgtaataaagcgcgcgccgtattgcgtgctatcgccaccgcgcatcatgcacaggagaccttctgatggctgatattctgctgctcgataacatcgactcgtttacctggaacctggcagatcagctacggaccaacggtcataacgtggtgatttaccgtaaccatattccggcgcagacgcttatcgatcgcctggcgacaatgaaaaatccggtgctaatgctctcccccggtccgggcgttcccagcgaggcaggctgtatgccggagctgctgacccgactacgcggcaagttaccgatcatcggcatttgtctggggcatcaggcgattgtcgaagcttacggcggttatgtcggtcaggcgggagaaatcctgcatggcaaagcctccagcattgagcatgacggtcaggcgatgttcgccgggctggcgaatccgctaccggtcgcgcgttatcattcgctggtcggcagtaatgttcctgccgggctgaccattaacgcccatttcaacggcatggtgatggcggtacgtcatgatgcggatcgcgtttgcggttttcaatttcatcctgagtccatcctgacgacacagggcgcgcgtctactggagcaaacattagcctgggcgcagcaaaagctggaaccgaccaacaccctacagccgattctggagaaactctatcaggcgcaaacactgacgcaacaagagagccatcagttgttttcggcggtcgtccgcggcgaacttaagcctgaacagctcgccgccgcgctggtgagcatgaaaattcgcggcgagcatcccaatgaaattgccggcgccgccactgcgttacaggaaaatgccgccccgttcccgcgcccggagtatctgtttgcggatatcgttggtaccggcggcgatggcagtaacagtatcaatatctctaccgccagcgcctttgtcgcggcggcctgtggactgaaagtggcgaaacacggcaaccgtagcgtgtccagcaaatcggggtcatccgatctgctggcggcgttcggtattaatctggatatgaacgccgataaatcacgtcaggcgttagatgaactgggcgtctgtttcctgtttgcgccgaaatatcacaccggattccgtcacgcgatgccggttcgccaacagttaaaaacgcgaaccctgttcaacgtactcggcccgctgatcaacccggcgcatccgccgctggcgttgattggcgtctatagcccggaactggtgctgccgattgcggaaaccttacgggtactgggctatcagcgcgcggcggtggtacatagcggcggcatggatgaggtttcgctccatgcgccgacgattgtcgcggagctgcatgatggcgaaattaaaagctatcaacttacggcggaggattttggcctgacgccttaccatcaggatcagttggctggcggcacgccggaagaaaaccgtgacattctgacgcggttattacaaggtaaaggcgatgccgcgcatgaggccgccgtcgccgccaacgtggcgatgctgatgcgtctgcatggtcaggaagatctcaaggccaacgcgcaaaccgtgcttgatgttctgcgcaacggcaccgcatatgacagagtcaccgcactggcggcaagagggtaaataatgcaaaccgttttagcgaaaatcgtcgcagacaaggcgatttgggtagaagcccgcaaacagcaacagccgctggccagttttcaaaatgagatccagccaagtacacgccatttttatgatgcgctccagggcgcgcgtaccgcctttattctggagtgtaagaaagcatcgccatcaaaaggcgtgattcgcgacgatttcgatccggcgcgtattgccagtatttatcaacattacgcctcggcgatctcggtgctcaccgacgaaaaatattttcaggggagcttcgattttctgccggtcgttagccaaagcgcgccgcagccgattctgtgtaaggattttattatcgatccctatcagatctaccttgcccgttactatcaggccgatgcctgtttactgatgctctcggttctggatgacgaacagtatcgccaactctccgccgtcgcgcacagtctgaaaatgggcgtgctcacggaggtcagtaatgacgaagaacgggagcgcgcgatagcgttaggcgcaaaagtggtaggtatcaacaatcgcgatctgcgcgatctgtcgattgatttgaatcgcacccgccagctggcgccaaaactgggccacggcgtgactgtcatcagcgagtccgggattaacacctatggtcaggtacgcgaactgagccacttcgccaacggttttttaattggctccgcgttaatggcgcatgacgatcttaacgccgccgtccgtcgcgtgctgcttggcgaaaataaagtctgcggcctgacccgcgcccaggacgctaaagcggcctgtgacgctggcgcaatatatggcgggttgatttttgtgccctcatctccgcgcgcggttagcgttgagcaggcgcgagaagtgataagcggcgcgccattgcagtatgtcggcgttttcaagaacgctgatatcgccgatgtttgccagaaagccgccgtcctgtcgctttctgccgtacagctacatggcagcgaagaccaggcgtatgtcaacgcgctgcgcgaggcgttgccgaaacaggtgcaaatctggaaggcgctgagcgttagcgatgcccttcccgcacgcgattatcaccatgtcgataaatacattttcgacaatgggcaaggcggcagcgggcagcgcttcgactggtcactgctacaggggcaaccgctggataatgtgttactggcgggcgggctggcggccgataactgcgtccaggcggcgcaagtcggctgtgccggtctcgattttaattcaggtgtggagtcacagccgggcatcaaagatgctcgtcttctggcctcagtttttcagacactgcgcgcatattaaggaaaaaacatgacaacacttctcaacccctactttggtgaattcggcggcatgtatgtgccgcagatcctgatgcctgcgctgaaccagcttgaagaggccttcgtcagcgcgcaaaaagatcctgaatttcaggcgcaattcgccgatctgctaaaaaactacgcgggacgccccaccgcgctgacgaaatgccagaacattaccgccggtacgcgtaccacgttgtatttaaagcgcgaagatttactgcacggcggcgcgcacaaaaccaatcaggtactgggtcaggcgctgctggccaaacggatgggtaaaagcgagattatcgctgaaaccggcgccggtcagcacggcgtcgcctctgcgctcgccagcgccctgctgggtctgaaatgccgtatctatatgggcgccaaagacgttgagcgccagtcgccgaacgtcttccgtatgcgtctgatgggcgctgaggtcatcccggttcatagcggctccgctacgctaaaagatgcctgtaacgaggcgctgcgcgactggtccggtagttacgaaaccgcgcactatatgctcggcacggcggcaggaccgcatccctatcccaccatcgttcgcgagttccagcgcatgattggcgaagagacgaaagcgcaaatcctcgacaaagagggccgtctgccagatgccgttatcgcttgcgtcggtggcggctcaaacgctatcgggatgtttgccgattttattaatgataccagcgtcgggctaataggcgttgaacctggtggtcatggtattgaaaccggcgagcatggcgcgccgcttaaacatggtcgcgttggcatctatttcgggatgaaagcgccgatgatgcaaacagcagacgggcaaattgaagagtcctattccatttccgccgggctcgatttcccgtccgttgggccgcaacatgcgtacctgaacagcatcggacgcgcggattatgtcttcattaccgatgatgaggcgctggaagccttcaaaacgttgtgccgccatgagggaattatcccggcgctggagtcctcccacgcgttggcgcacgctctgaaaatgatgcgcgagcagccggaaaaagagcaactgctggtggtcaatctctctggccgcggagataaagacatctttaccgtacacgatatcctgaaagcgcgaggggaaatctgatggaacgctacgaaaatttatttgcccaactcaacgatcgccgggaaggcgcttttgtccccttcgtgaccctgggcgaccctggcattgaacagtcactgaaaattattgacacactgattgacgctggcgccgacgctctggaactgggggttcccttctccgatccgctggccgatggccctaccatccagaatgcgaacttacgcgccttcgccgctggcgtcacgccggctcagtgttttgaaatgctggcgctgattcgtgaaaaacacccgaccattccgattggcctgctaatgtacgcgaatctggtgttcaataacggcatagatgcgttctatgcccgttgtgaacaggttggcgtagattccgtgctggtcgcagatgtcccggttgaagaatcggcccccttccgccaggcagcgttacggcataatatcgcgccgatcttcatctgcccgccaaatgcggatgacgatcttctgcgccaggtcgcatcttacggccgcggttacacctacctgctttcgcgttcgggtgtcaccggcgcggaaaaccgtggcgcattgccgttgcatcatctcattgagaagcttaaagagtaccatgccgcgcctgcgttacagggcttcggtatctcctcgccggaacaggtgtctgcggccgtgcgtgccggggcggctggcgctatctccggctcagccattgtcaagattatcgagaaaaacctcgcgtctcccaaacagatgttggcggagctcaggtcctttgtctcagccatgaaagccgccagccgcgcataacgggttaagccgtcagcataacgctggcggcttaatgagtggctggcgccgaaccagaatcacgattcagacgtacatcatcaatctttttggtgttattccccgtccagctttcaaaaagtctgaagtcaatttttgctaagaaaactcctaatcacgccgaaaaatttagcgttttcacgtcaatttcccccgcctttatgtaaagaaatgtcaacaaacaatgcattaacgtttccagggccgcagatagtgacgattgttattaataacaatgcaaagcatttcctgttaaatcgcttattctaaaagaaaatatagaatatattatctctaaaccattttttgtgcgttatttacgcggtaaatcacaactatttccgtcaatttgactaatcggtttaaccaactaattttaatagggtgtcgacacggttaaaaccgattttttcagcaagcaacgagacaggagaaataatatggccgaacatcgtggtggttcaggaaatttcgccgagaatcgtgaaaaagcatctgaagcgggccgcaaaggcggtcagcatagcggcgggaatttcaaaaacgatccgcaacgagcttctgaagccggtaaaaaaggtggtcagaatagtcacggcggacgtaaatccgataattcctgatttactgtaatgtaaatataacacatgcttttatcaagcaatctgcgagtcttctggctcgcagtattttgcccaggagaattagatttatgaatatcaaaaccgttgaagacctttttatccatctactttcagatacctatagtgcagaaaaacaattaaccaaggctcttcctaaacttgccagagccacgtccaatgaaaaattaagccaggcctttcaatctcatcttgaagaaacccagggtcagattgaacgtattgatcagatcgtcgaatctgaatctggcattaaactgaaaagaatgaaatgcgtcgctatggaagggctgattgaagaagccaatgaagtcatcgaaagtacggagaaaaacgaagtacgcgatgcagcgcttatcgccgcggcgcaaaaagtcgagcattacgaaatcgccagctacggcacgctagccaccctggccgagcagctcggctatagcaaagcattaaaactgctcaaagaaaccctcgacgaggaaaaacaaactgatttaaaacttaccgatttagcagtcagcaatgttaataaaagtgctgaacgcaaatcgaaataatatttttaattatcagcttgcatgattccgattttattatcggagcagattatcacgcattgaggaatgtaaaatgaattatactgaacattatcatgactggcttcgtgacgcccatgccatggaaaaacaggcagaatcgatgcttgaatctatggccagccgtattgaaaattatcctgatataaaagccagaattgaacaacatattagtgaaaccaaacatcaaattaccatgctcgaagaagtgttggaccgtaatggcatttcccgttcggtgttgaaagactccatgagtaaaatggcagcaatggggcaatctatcggtggcatgttcccttccgatgaaattgtcaaaggttcaattagcggttatgttttcgagcagttcgaaattgcttgttatacctccctgctggcggcggcaaaaaaagctggcgacactgcctcaattccgacgattgaagccattctgaaagaagaaatgcaaatggctgactggcttatcaaacatattccgcagacaacggaacaatttttactgcgatctgaagcagatggcgttgaagccaaaaaataaataataagcaggaggcaatatgtttcgacacgtaaaacaacttcaatatactgtgcgagtgagcgaacctaatcctggattagcgaacctgctgctggaacagtttggcggcccgcagggcgaactggcggccgcctgccgctacttcacgcaaggtttaagcgatgatgatgccggtcgtagagaaatgttaatggacatcgccaccgaggagctgagtcatctggaaattatcggctcactggtaggaatgcttaataaaggcgctaaaggcgagctggcggaaggtaccgaaaacgaagcggaactttatcgctcgctgacgcagaatggtaatgatagccatatcacctctctgctgtatggcggcggcccggcgttgacaaactccggcggcgtaccgtggaccgcggcttatattgatactatcggcgaagtcacagccgatctacgctcaaacatcgcggcagaggcgcgagcgaagatcatttatgaacgcctgattaatctgaccgacgatcctggcgtaaaagacacactcagtttcttaatgacccgtgaagtcgcgcaccagctctcttttgaaaaggcgctgtattcgattcgtaacaacttcccgccgggtaaattaccgccggtagaacagtataccgacgtgtactacaacatgtcgcaaggcgacgatccgcgaggtagctggaatagcgatgagaacttcaactatgtcgcagaaccgatgcctgctgttgatggcggcgatggcctggcgacagtgaaattgccgcgcgagcagatggcgctgctcaaagcgatggcagaaagaacgaaatcggaccccaccgttgatcctctcactggcgcagaactaggctgcggcgaaccgaaagaagacaagtgagttccgacaagtaaaatccgtgtgtcatgtccttttttgaccccgcctggcggggtcttttttcgtcacaacatcacgcgattagaaacgatagcctgccgagaacataaatacccatgggtccagacgcacgctgtcatgatgctgaacgccgcccattttataattggcggtagtatcaatatccatgtaccagacagaggcgccaattaaccagtcgcggttaatcaggtaatctaccccaacttgccctgccgcgccccaggaatccttaaagctcagatcggacagcccggcatttttaccattatcgttaaagtcgttatcgaagaaggtggtgtagttcacccccacgccgacataaggacgcactttgctgctggaatcgccgaagtaccactgcgccattaacgttggcggtaacaggtggaccgtggcgatatcgcccgtcgcgcccgtacccaccttatggcggaacggcgtagccgccagcaattcaaccccgatattgtccgtcgccatgtaagtgaatgtcaggccgagttgcgtgttattactcacatcaaacccgtttaaatgccccagcgtaccacccgccccttctgtaggtctgacggttgccggacctgcacgcataaagaattctccggcttcgtgcgcgaacgcgctgcctgagagaagagttgttaacgccagtgccgccactgtaaattttttcatacccgctccatcgttatggttataaaagcgtgatgaatatacccacaatgaagtaataagtgatctaatacagatcacatttgttcttataatttaacatttattgatccagattaatttagaacttgtattgaaaatcctggttataggaattcagatcaattttgacatattcacgctatgcaaatatttgtctgctcctgttgccctggcgataaaggctggctaaggtaatcaatgtcccgcaatggcgcgtggcgttaagattcgcgaacactgcgggacagattaatttccgttgtaatctattgatacgttagttttttgcaggtgaatcatgagcgttcttaacccatgcatgacatgcggtgcctgttgtgcctattttcgtgtctccttttattgggctgaaggcgacgatgccagcggacgcgttccggcgtcattaaccgagcctgttaccccttttttacgttgtatggccggtaccaaccaaaaacagccgcactgtaaagcgctaattggcacgccgggtgaaaacgtcagttgcgctatttatgaaaaccgcccttcaacctgtcgcgaattttcgatatcgggcgaaggaggcgaagtgaatgaggcgtgtaatcgcgcccgcgcgcgatacggattaccgccgctttacaaagatatgcttttccatacaactgctgatgctgccactgtagagttatccagggtacaattgcccgcaaattaacacctgcaaaactcaaggagagtgcatgtctatcacggcgaagtccgtttaccgtgacgccggaaattttttccgaaatcaatttattactatcttgctggtttcgttgctgtgcgcatttatcacggtggtcttaggtcatgccttttcacccagcgatgcgcaaatcgcgcaactcagtgaaggagaacatctggcaggcagcgctggcctgtttgagctggtacaaaatatgacgccggagcagcaacagatcctgttgcgcgcctctgccgcctcgacgttttccgggcttatcggcaacgctattctggccggcggtatcatcctgatgattcagttagtttcagcgggacatcgggttagcgcgctgcgcgctatcggcgccagcgcccctgcattgcctaaactgtttattcttatttttctgactaccctgttagtgcaaatcggtataatgctgattgtcgttccggggattattatggccattgtgctggcgcttgcgccagtgatgttggttgaagagaaaatgggcgtgtttgccgcaatgcgcagcagtatgcgtttagcctgggctaacatgagactggtcgcgcccgcggtgataggctggttactggctaaaacattgctattgctgttcgcgcccagcttcgctgtactgaccccaaatgtaggcgctgtactggcgaatacgttgagcaatctgatttccgcagtattgcttatctacttattccgcctgtatatgttgattcgccaataatccgcaatgcgccgttacgcggcgcattcgacgctcgttgatgatggaatcgaagaatgaagcagtttctggattttttaccgctggttgtcttttttgcgttttataaactttatgacatctatgcggcgacctccgcactgattgtcgcgacggcaatcgtgctgatttatagctgggtgcgctatcggaaaatagagaagatggcgctgattacctttgttctggttgccgtcttcggcggtctgacgctcttcttccataacgatgaatttattaaatggaaggtgacggttatttatgcgctgttcgccggcgcgctgttaataagccagtgggtgatgaaaaaaccgttaattcaacgtatgttaggtaaagaactggcgttgccgcagcaggtctggtcaaagctgaacctggcgtgggcgctgttttttattgcgtgcggtctggctaacatttatatcgccttctggttgccgcaaaatatctgggtcaactttaaggtctttggactcacggcgctgacgctcatttttaccctgctgagcggcgtctatatctaccggcatctgccacaggaagataaatcataaccctcccgtgacttatcatcgccagactgcgaacgcctggcgatattttctccgcctttacgccctgcgctttcccgtcagtacctttattcccactattctccacacaaaattcatagtagcatcgcggctgtaattttttctgatagtcggttttacaatgacaacaatggataatactcctcagggcgagctggttttacgtacattggccatgcctgccgataccaatgcgaacggcgatatttttggcggctggctgatgtcgcaaatggatattggcggcgcgatactggccaaagagatcgcgcacggtcgggttgtaaccgtacgcgtggaaggaatgacatttctgcgccccgtcgcggttggcgatgtcgtatgctgctacgcgcgctgcgttaaacgcggtacgacgtctattagcataaatattgaagtctgggtgaaaaaagtcgcgtcagaaccgattgggcagcgctacaaggccaccgaggcgctgtttatttatgttgccgtcgatccggacggtaaacctcgcccgctcccggttcagggttaagtatacccgcttacgccgccagcaggtgatggtatattcctggctggcggcgccagagattactcaatctgcgccgtaccgttcagacggaagataatattgaccaccagcccggaacccggcttgcctgcttcatagcgccattttcgcatcgcattcttaacttcacgctcaaacatattggctggctgcgcggatagaatctgtacattttccactcgcccagcagaggtcacgtcaaacttcacctttacgcggccttcaatacgtaacgcctgtgctcgcgccggatactgcggctggttacggctcagagcgcgaggtccagtgggcacgctcaccgcgggcttgctggtcgccgatgcggtgctgcttgttggccgcaccggggcgctattttcaaacggtgaggcaggacgcggcgcggctggtttgacttcgcgcttcggctgctcttcaacctttttcaccggtttcggttttggcttgggttttggcttaggtttgggtttctcaatcaccacgggcgcttctttaggcggttcagggatcggctctggctccggttcgggttcgggttcaaccaccggctccggcggcggctgaaccgcctggggcggctccaggtcagcgggtgaaaccattgtcaccgtgataggctgcgctggcgcaggcaattcaataacctgatgtaccgaggtatagagcaaacctgccactacagcaccatgaatgcctacggaaaggagtgtcggccagggaaagcgacgaggtaaatcaagggtcattgaagtcataatcgtttcagttgaaaaaccagagctgaattttaaatgcaaatagcaatcatattcaataaggcattgccgatagcggcatttaaaagatgatatcgcacaaaaacaccacacaaaatgtgcatgtttaacaaagtcggtatctttacattgcagttaaatgccctttccaataacgtaatcagcaacttttaccgattaaggagctctacccgtgctgtatgttatttacgctcaggacaatgccaactcgcttgaaaaacgcctctcggtacggcccgcgcatctggcgcgcctgcaacttctgcatgatgaagggcgattattaactgccgggccgatgcccgcagtggacagtaacgatcctggggtagccggatttaccgggtcaacggtgattgctgaatttgaatctttagaagcagcgcaatcctgggctgatgcggacccctacgtcgccgcgggcgtctatgcgcaggtttcggtcaaaccgtataagaagatcttttgaaaaggatggcctgttgggcaccgcatacggtgccctttctggctcacacaccgtgaatcgcaaagagtaatgaattacgctgacgattaaagatgcatttcctgatggtatggatacgcatattacggcgtgattgcccttcaagccaacgcgctttacggcggctcgcctgacgtagcattcgccagcgccccacttccgttctactacgcttcatgtttacgactctcactgtaacagaagcgccattataccccctcgccggatgcagaccagcgcttttcccgtgtttttatttgccatgtgaatcctgacgcgtaaactcttaacaacacgctttctaaaggatttttaaagttatgacaaccttctacaccgtggtgagttggctggtcattttgggatactgggttctcattgccggcgtcacattacgtattctaatgaaacggcgcgcagttccctccgcaatggcctggttgttaatcatctatatccttccgctggtcgggatcatcgcctatttgtccgtgggcgaattgcatttaggcaaacgtcgcgccgagcgtgcccgcgccatgtggccgtctaccgccaaatggttgaatgacctcaaagcctgcaaacacattttcgcgcaagaaaacagtagcgtcgcatcgtccttgtttaagctgtgcgaacgacgtcaggggattgcgggcgtcaaaggcaaccagttgcaattgcttaccgactccgatgatgtcatgcaggcgcttattcgcgatatccaactggcgcggcataatatcgaaatggtgttttacatctggcagccaggcggcatggcggatcaggtcgctgaatcgctaatggccgccgcccgccgcggcatccattgccggcttatgctggactccgcgggtagcgtcgctttcttccgcagcccctgggcggccatgatgcgtaacgctggcattgaagtcgtagaggcgctgaaggtgaatctgatgcgcgtctttttacgccgtatggatcttcgccagcaccgtaaaatggtgatgattgacaattacatcgcctataccggcagtatgaatatggtggacccgcgttttttcaaacaggatgccggcgttggacaatgggtcgatttgatggcgcggatggaggggcccgtggcgacagcaatggggattgtttactcctgcgattgggaaatcgagacgggtaaacgcattctgcctcccccgccggatgtgaatattatgccgtttgagcaggccagcgggcataccattcataccattgcttccggtcctggatttccggaagatctcattcaccaggcactattaaccgccacctatgctgcgcgcgaatatttaattatgaccacgccatatttcgtccccagcgacgatctgctgcacgctatttgtaccgctgcgcagcgcggcgtggatgtcagtattatcctgccccgtaaaaatgattcactgctcgtcggctgggccagtcgcgccttttttagcgagttactggcggcgggcgtgaaaatctatcagttcgaaggcgggctgttacataccaaaagcgtgctggtcgatggcgaactgagcctggtcggtaccgtgaatctcgacatgcgtagcctgtggcttaatttcgagattacgctggtcattgatgatacgggtttcggcgccgatctggctgcggtacaggacgattatatttcgcgctcccgcctgttagatgcacgtttgtgggtaaaacgtccgttatggcagcgtattaccgagcgattgttttacttctttagtccattgctgtaaaacgtgaccaacatgagtaaacaggtagtcactatggaaatggatctgaacaatcgcctgactgaagacgaaacgcttgagcaggcttacgatatttttcttgagctggcggcggataatcttgatccggctgatatcattctgttcaatttgcaattcgaggagcgcggcggcgcggagttgtttgatcccgctgaagactggcaagagcacatcgattttgacctgaatccagacttttttgccgaggtggtaattggcctggcggataccgaagacggcgaaattaacgacatttttgcccgcgttctgctgtgccgggaaaaggaccacaagctgtgccatattctctggcgcgaataagcggttcaggccggatggcgtctgattgcgccctccggcaagcctgtttaatccggtagcttactgccgcatcggttacaatattgcgcgctatgttcatgctggctttgctggcactgcggacattttcgctgccagtgacgtttttgaaacgcgctgctcatgtgcgtggtaatcagtcctgtaggaatcgcaatcaccgaatagccaatcaaaataagcaccgacgcgacaatacgtcccagcggcgtatgcggcgtaatatcaccgtaccccacggttgtgactgtcactatcgcccaatacaccgaggcattaagcgtcgtgaagccatatttcggtccttcaataagatacatcagggcaccgaaaataatcatcacgatcgcaataaatgaatagaacagaataagctgatgacgcgcgctaataatggcgctccagaatacccgcagcgatggcataaagcgtagcagtttaagaatacgcagcacgcgaatcgctcgcatagcgcgccaggcaaacatatagttcaggctaatttccggccacagccacatgacgtacagcggcaaaatcgtcaccagatcaataaatccccagaaactaaaaacgtattttgccggttcgggccagctaaacagtctgagcaagtattcaccggtaaatatcagggtaacgcagagctccagccagacaaaaatatgccattcatcaaatgtcaggtgatattccgttcctacgcctgattcaacaaaaatgaccagtacgctaagcagcgcaaacagcgcgcataacccttcaaaacggcgacctgagcgcgtagtcaaatcgaacagattatgataaagacgacggcgaaccgacgacaaagaaagtgacacggtaacctcacctaaaagaagggctgacgaattgtcagcccttgcgattataacgggtctactttaaggcaggaaacggcatggcgaaaactcccttccagcaccggtcgcgtttgcgcgcattctggcccggctatcggacagcgtgtacggaacacgcagccggaaggcgggttaatgggcgaaggtaattcgccctccagcaattgtatcttcttatttcgctccagatcgggatcgggaatcggtaccgccgacatcagcgctttggtataaggatgcagtggattatggtacacctcatcataggtgcccaattctactgcatgaccgagatacatcaccaggacacgatcggatatgtgctttacgaccgccagatcgtgcgcaataaaaatcaacgacagccccatctctcgctgtaactgctggagcaaattcaccacctgcgcctgaatagaaacgtccagcgccgacaccggctcatcgcaaataatgagcttaggttccaggatcaatgcccgggcgataccgatgcgctggcactgccccccggaaaattcatggggataacggttgatgaggttcggcaacagccccactttcagcatcatggctttcacgcggtcacgcacgtcctggcgcgaaagtttaggatgataagtgcgcagcggttcagcgataatttcgccaatcgtcattcgcgggttgagtgacgccagcgggtcctggaaaatcatctggatatcgctgcgcacctcgcgccactcatccgctttcatgcccagcagatcttttcccagccaggcgactttaccatctgtcgccttcaccagaccaataatcgcgcgcgcaaacgtcgacttgccgcagccggattcgcccaccacgcccagcgtttcgccttcatacaggcgtagcgtaacgccgtccaccgctttcagggttttcggcggttgccagaaccactgcttcccttctttgatatcaaaatgtactttcagatcggcgatttcgaggagaactttacgttgttcaatcacagcattcatagcagttcctccaccggtttaaaacaggcgcgcaagcgaccaggactaaacgcttcaagtggcggcgcattattgcagatctccatcgcatgaggacaacgcggctggaacggacaacctttaggcaaacgcaataaattgggaggattgcccggaatcgtcagcatttccgccccctcgctatccagacgcggcaccgcattaagcaggcctatcgaatacggatgaacgggctgataaaagacatcgcgcgccttaccgtattccatggtacgcccggcatacattaccaggaccttatcgcaaatacccgcgaccacgcccagatcgtgggtaatcatgataatggcggtattaaattcgcgctttagctcattaagcaaggtcataatctgcgcctgcacggtaacatcaagcgcggtggtaggctcatcggcaataagcagtttcggcctgcacaacagcgccatcgcaatcatcacacgttgacgcattccgccggaaaattcgtgcgggtacattttcatccgtttgcgcgcttccggcatttttacggcatccagcattctgacggactcttcaaaagcttccgctttgctcatccctttatgcagcatcaggacttccattaactgctccccaacgcgcatataaggatttagcgaggtcatcgggtcctgaaaaatcatcgaaatctgttctgcgcgcagcgtattcagttcgcgctcaggtagattaagaatttcacgtccgttgaaggtcgcggaaccgccgattcgaccattcgtcgccagcagtcccattaatgcgaacgccgtttgcgatttccccgatccagactcgccaacaatacctaacgtttctccagcgcgaagcgtaaagttcagatcgttgaccgccgtcacatcgccatcaggcgtagcgaacgtaacacgaagatcgtttacctccagcagtacattcgccggttgcggcgcctgagttgcggtttctgataagctcatggctgtactccttaacgatctttcgggtcgagggcatcacgcaggccatcgccaataaagttaaaacagaataacgtcaccacgagaaagccagccggaaacagcagcagccacggtgagacttccattgaatttgcgccatcgctcaataacgctccccaactgcttaacggttcctgcgtcccaagccccaggaaactgaggaaagactcaaacagaatcatgctgggcaccagcaacgatgcatacactaccactacgcccaggacgttaggcacaatatggcggatcacaatgctggcagtcgacacaccacccacctgcgcggcttcgatgaattctttacgtttaagacttagggtttggccacgcacgatacgcgccatatcaagccaggagaccatgccgatggcgacgaaaatcaacagaatgttctgcccaaaaaacgtcaccagcaaaatcacaaagaacataaacgggaacgagttgaggatctccaacaaacgcatcatcacagaatcaattttgccgcccagatagccggacagcgagccatacagcgttccgacaatgaccgccaccagcgcggcggcaatcccgaccattaatgagatacgcccgccgatggcaacgcgcaccaacagatcgcgcccggaagagtcagtgccgaaatagtgaccggacgccatatccggcgcactggacatcatgccccagtcggtatcgaaataggtaaattgcgacagcataggcgccactgtcacgaacagggctatcagaaacaggacaataagactggccaccgccgcacggttatgcataaagcgccgacgggcatcttgccaaaggctgcgaccttccacctccagcttttcactgaaattttccagcgtctcgctgtttttcttacttaacatcatcgcgagctccagtatcaatagcgaattttcgggtcgataacggcatagagcacatcgacaatggcgttaaataatatggtcagcgccccgactagaatggtcaaacttaacaccagcgagtaatcgcggttgagcgcgccattaacgaaaagctgcccaatgcccggtaagccataaatagtttcaatcaccattgagccggtaataatgccgacaaaggctggccccatataggataaaaccggcagcagcgcaggttttaacgcatggcggaagataattctgcgcatcggtaatccttttgcccgcgcggtacgaataaagttcgaatgcagaacttcaatcattgagccgcgcgtaatacgagcgatgctggcaatataggccagtgaaagcgcaaccatcggcaggatcataaattttaacgccccgccgttccagccgccgccaggcagccattgcaaggttatcgcaaagaccatcaccagtagcggcgccaccacaaaactggggataacgacgccggtcatggcaaatcccatcaccgtataatcccatcgcgtattttgctttagcgcggcaatcacgccagcgctgacaccaataatgaccgccagcaaaaaagcggcggcgccaagtttcgccgaaacggggaagctggcggcaaccagatcgttgaccgtgtaatctttatatttaaacgatggtccaaaatcgccatgcgccagctgcttcaggtagctgaagtactgcgtcatgatgggatcgttcagatgatattttgcttcaatattggccagcacttccggcggcaatgcgcgctcgccggtaaaaggactccccggcgcgaggcgcatcataaagaaagagatggtaataagaataaacagcgtcggaatcgcttccagacagcggcgtaaaataaatttcaacattgcccgtaccttctggcctgtgcctttacttcccggacgtgacaaaagatccgccagggaaagttatagtgcgatgaaaaaagacaccatgggacaaccgcagttgtcccatgtcttgccattaatgtttgataatatataagtttttcacataaatattatccagcgggtctttaccggtatacccgcccacccagggtttcaccaggcgcgcgttaacgtagtaatacaccggcacaatagccgagtctttatctaactgctgctccgctttagcgtagagttcgctgcgctgcgtatcgtccgccactttcagcgtgtcggcaatcagcttatcaaacgccgggctcttataatgcgcggtgttatttgaactgtcggacaacatggtattcaggaacgaggtcggttcattataatctgcgcaccacccggctctggcaacatcaaaggtgccctgatgacgggtatccaggaaggttttccattcctgattctccagattcacattgacgcccagatttttcttccagatagacgccacggcaatggccagttttttatgcagatcggaggtgttatacagcaggtcgaatgttaagggcttatccgccgtaaagccggcttcagccaacaatttcttcgcttcttcattacgcttttgctgggaccatttgaaccactcaggctctaccagttttgcgccatcggtatacggcggcgtgtagctataagcgggtaaatcgccctgatttttaaccttattaacaataatgtcgcgatctaacgccagtttcagcgcggtacgcacgcggacatcgttaaacggcgctttttgattattaatttcgtaataataggtacacaaataagggtctacgcggacttcattcgggatctctttcttcagtttctggaataattcgatcggcatattgttataagtcatatcgatctcgccgctgcggtagcggttgacatccgtcacctccgaagagataggcaaataagttacctgattgatgacggttttggcgttatcccagtattgcgggttacgctccagcacgatacgttcgttcaccacccagttttttaacttataagcgccgttagtgacaatattggccggttgcgtccatttatcgccaaatttttcgaccgctgatttcggtacaggagacactgaagggtggaccaacaatttgtagaaataaggcaccggctcacttaaggtcacttcaaaggtgtgatcatcaagcgcttttacccccagatcggtggcgggttttttaccggcgataatgtcatcgatattagcgatatgaccgtattgcagatagctggcgtacggcgatgccgtattaggatcggccaggcgttgccagctataaacgaaatcatgggcggtgacgggcgtaccatctgaccatttcgcattttcacgtagatggaatgtccagactttaaaatctttattttcccatttttccgcgacgcccggtgaaggatgcccctcgacatcactaattaataagccttcgaagaggtcacggctgacgttcgattccggcacgccttcaattttatgcgggtcgagagactgcacttctgatccgttattacgtaccaacgtttgcttgtcggctaactgaacgccggcgggcacgtctgccgcagtcgcggcgctggcggcgatgagcgcagtgagtattcccgctgcaatcaaactttttttcgtgatgttagacattgtgtttgtactccactcattataattactggtttttaccagcctgtttaatcccgtcagggttcctgtgcagcactggtggtgtactgccaggtctgtcactgcttttgctatcaccgactttatttattctgacgattcgttcgatcgcctttcgtcgattcggtatacgacgtacctgcccacgtcgcacgttatttctgacaaccatctaaatgaaaatacttatcaacaatgtgaaatcttctacaaaaatgtttggccgaaaagtatcaaatgcgtttctgaaccgccaattcattttacaattttgttaaccaattctcttttatggaaaaatccctgcccaaaaaaacagttaaacaatgttaaaaatctttgatttattctttataatcaataagttgaaagaaaaatatctctctgtcgcatcgtaggttatgcctgcgccagaaaacacacacaaatttaacaaatgctcattatttagcacattcatctacgatggagctgaaacaactaataacatttcaataatccttcatcaagccccagagtatggtgtgaataaaataacagacctaccgcctctcacggtctcagtaatgttgataatagtttgattaataaaaataaatagcgttagattatattagtattttttatcatttaaacgctgaatgcttatcaaagtaagaagtgttacgtgggaatgtcacaaggcggccccttagggcgccgcctgtaaatcagcaggtgggagtttagttgagcaagccggggaaaatgccttttattcctgtgacaataaattcgatgccgagcgccattaacaacaaccccatgattcgggtaataacgttgataccagtttgccccagcaaacgaaccagccacggcgccatacggaacacgccccagcagcaaagcgcaaaaagcgcaatggcaactgaaaagccaagcaaatgcgcgatgctgtgataacgcgtcccccagacgatagtggagctgatcgcccctggccccgccattaacggcagcgctaacggcacaacgccaatgctctcgcgtatggccgtctctgacttttcttgcttgttttgtttatcttcccccagcttcccgctgatcatcgacattgcaatggtgacaaccaggataccgcccgcaattctgaacgaatcaatagaaataccaaagagttgcaggatgccatcgccgaggaataaggaactccacaagataatcgcaaccgacagattcgcggtgaggttagttttattacgcgccgtggccgtctggtagctggtcatgctgatgaaaacggggataatccccaccgggttaaccagcgcaaagagcccgataaagaacttaaagtaaacaggaaaatcaaaaagcggttgaatcacggttagctccgaagcgttagccggatgaagtcaatgttcgttaatgatcaaaacgcgcagaagatacgccttttattcgcatagttcacctcttatctacgcctaatttcatccattcatcgctgttatttatatgtactcgttatgctaatccactcactcttcatgataacgatttcttaacaatttacataaaaggctaaaatggcctgctgaaaggtgtcagctttgcgtaatcttgatttagatcacacaatcgctactcagaagtgagtaatcttgcttacgccacctggacgtaacgcgttagagttaaatgatactaacgcagaagctcttttagtaaatcagagcgaaacggacgttaagtaaccacctgaatttcaggcatttatacaaagtatcgtcgatctgtctatactcacgtatcgcgcagatgatttactaaaaaagtttaacattatcaggagagcattatggctgttactaatgtcgctgaacttaacgcactcgtagagcgtgtaaaaaaagcccagcgtgaatatgccagtttcactcaagaacaggtcgacaaaatcttccgcgccgccgctctggctgccgctgatgcccgcattccgctggccaaaatggccgtcgccgaatccggtatgggtatcgtggaagacaaagtgattaaaaaccacttcgcttctgaatatatttacaacgcctataaagatgaaaaaacctgcggcgtgctgtctgaagacgacaccttcgggaccatcaccattgctgaacctatcggcattatttgcggtatcgttccaaccactaacccaacctctaccgcgatcttcaaatcgctgattagcctgaagacccgtaacgccatcatcttttctccgcatccgcgcgctaaagaagcaaccaacaaagcggcagacatcgttctgcaagcggctatcgctgccggcgcgccgaaagatctgattggctggatcgatcaaccttccgtagaactgtctaacgcgttgatgcaccacccggatattaacctgatcctcgccactggcggtccaggcatggttaaagctgcatacagctccggtaaaccggctatcggcgtaggcgcaggcaacactccggttgtcattgatgaaaccgctgatatcaaacgcgctgtggcgtctgttctgatgtctaaaaccttcgataacggcgtaatctgtgcttctgaacagtctgttgtcgttgttgattccgtctatgatgccgttcgcgaacgtttcgccagccatggcggctacatgctgcagggccaggagctgaaagcggttcaaaacgttatcctgaaaaatggcgctctgaacgccgctatcgtcggccagccagcctacaaaatcgctgaactggcaggcttctccgtaccagaaaccaccaagattctgatcggtgaagttacggtcgttgacgaaagcgaaccgttcgcacacgaaaaactgtctccgactctggcgatgtatcgtgcgaaagatttcgaagaagcggtagaaaaagcagaaaaactggtcgctatgggcggtatcggtcacacctcctgcctgtacactgaccaggataaccagccagaacgcgttgcttacttcggtcagatgatgaaaaccgcgcgtatcctgatcaacaccccggcctctcagggtggtatcggtgacctgtacaacttcaaactcgcaccttccctgacgttgggttgtggttcctggggtggtaactccatctctgaaaacgttggtccgaaacacctgatcaacaagaaaaccgttgctaagcgagctgaaaacatgttgtggcacaaacttccgaaatctatctacttccgccgtggctctctgcccatcgcgctggatgaagtgattactgatggccacaaacgtgcgctcatcgtgactgaccgcttcctgttcaacaacggctatgcagaccagatcacctctgtgctgaaagcggctggcgttgaaaccgaagtcttcttcgaagttgaagcagacccgacgctttccgttgttcgcaaaggcgctgagctggctaactccttcaaaccggacgtgatcatcgcgctgggcggcggttccccgatggacgccgcgaaaatcatgtgggtcatgtacgaacatccggaaactcacttcgaagaactggcgctgcgctttatggacatccgtaaacgtatctacaagttcccgaaaatgggcgtgaaagcgaaaatgatcgccgtcaccaccacttccggtaccggttctgaagtcacaccgtttgcggttgtgaccgacgatgcaaccggtcagaaatatccgctggctgactacgccctgaccccggatatggcgattgtcgacgccaacctggtgatggatatgccgaagtccctgtgtgcgttcggtggtctggatgcggtaactcacgctctggaagcttatgtttccgtactggcttctgagttctctgacggtcaggctctgcaggctctgaaactgctgaaagaaaacctgccggcgtcttaccacgaaggttccaagaacccggttgcgcgtgaacgtgttcacagcgccgcgactatcgccggtatcgcgtttgccaacgccttcctcggtgtatgtcactccatggcgcacaaactgggctctcagttccacattccgcacggtctggcgaacgccctgctgatttgtaacgttatccgctacaacgcgaatgacaacccgaccaagcagaccgctttcagccagtacgatcgtccgcaggcacgccgtcgttacgctgaaattgctgaccacctgggcctgagcgcgccgggcgaccgtaccgctgctaagattgaaaaactgctggcatggctggaaagcattaaagctgagctgggtattcctaagtctatccgtgaagcaggcgtacaggaagctgacttcctggcacacgttgacaaactgtctgaagatgccttcgatgaccagtgcaccggcgctaacccgcgttatccactgatctccgaactgaaacagattctgctggatacctactacggtcgtgatttcaccgaaggtgaagttgcagcgaagaaagacgtcgttgccgcaccgaaagcagagaaaaaagcgaaaaaatccgcttaattcgttatctgttttagcatgacaataacggcctcaattgaggccgtttttttgttttacctgtttatctgatgcctgaaggcgctatgctgatcatctggcctacgtgctcacggcacgcccttcgtcaggaggcctgaataatgacctccaaagcgctacagggcgttttataagccgctctttacctcaggtatcatatgtgccgatgacgctcctgaatcgccgtcagtgagccctcctccagcgcgtccttataatgcttacggcaaactgaaacgtagcgttcattcccgccaataaccacctgttcgccttcgttataaggcctgccgtcctgatcaaggcgcagaaccatactggctttacgaccgcagaaacagatagtttttaattccaccagcttatctgaccatgccagcaagtattggctgccgacaaagagctccccacgaaagtctgttcgtagcccatagcaaagtactggaatatctaatttgtcgacaacctcggataattgataaacctgctggcgagtcaaaaactggctttcgtcgactaacacgcaatgtattgtctgccgcgcgctctcggcacgaatctcttcaaacaaggatgtattttggttaaacaattttgccggcgacgacaaaccgatacgagagctgactttgcctgcgccgaaacgatcgtcgatttccgccgtatatacgacggtacgcatcccgcgttcctgataattgtatgaagattgcagcagtgcagtcgacttacccgcattcattgccgaatagtagaaatatagctgtgccattggtcgcaggacctcacctgagtgaaataaagattggcgggattgtaccataatttaccgacgcgacggcgcggctcgcgctccggtgagtattaagaattgtacaaacatcgctcactatacccaaaataattcgcgttgcttaaaggcggcaagggagtgagtccccaggagcatagataactatgtgactggggtgagcgagcgtagccaacacataagcaacttgaagtatgaagggtatatacacattccttcacaaattatgccgttaaaattcatcaacaatgcttatcatcacccgccaatatgaaaaccttgtacttattgttaccgttactcatacccggtgcaaagtaatagggttttcttgtaaggaaagctaatacaagagattgatatctctgcaatgagatcgtatttcatcatgataaaatgtgacctgactcctaaatttttagcgacagacggtgagtatcccccctgccaataagctcttttttgtgcggtgcctcaaggaaaatttaagttgagataattaaaacgtgtgcttaataaagcgtaattttgaattccttacattcctggctattgcacaactgaatttatcgctctattattagctcaacaaaccaccccaatataagtttgagattactacaatgagcgaagcacttaaaattctgaacaacatccgtactcttcgtgcgcaggcaagagaatgtactctggaaacgcttgaagaaatgctggaaaaattagaagttgtcgttaatgagcgtcgtgaagaagaaagcgctgctgctgctgaagtggaagaacgcactcgtaaactgcaacagtatcgtgaaatgttaattgccgacggcattgacccgaatgaactgctgaatagcatggctgccgctaaatccggtaccaaagctaaacgcgcagctcgtccggctaaatatagctatgttgacgaaaacggtgaaactaaaacctggactggccagggtcgtacaccggctgtaatcaaaaaagcaatggaagaacaaggtaagcaactggaagatttcctgatcaaggaataatttacttcctggatgcttaaaatcccgccgctggcgggattttttttgcctgagttctccgctgacgaccccaggcataaaaaaagcgccggatttaccagcgcttctgttaaaaaatttataacgtatcgttacttcttaatacccatttcttcttcaagccaggctttaaattcagcacccagcgaattatgacggatgccatattcaacgaatgcctgcatatatcctaacttattaccacagtcatggcttttacccttcatgtggtaggcttcaaccgtttctttttcgatcagcatatcgatagcatcggtcaactgaatttcatccccggcgcccggaggggttttcgccagcaacgcccagatatccgcgctcaacacataacgcccgacaatcgcaaggttagacggcgcgacatccgcttttggtttttcaaccacgccaaccatcggcacactttcgcccggcgccagctcaacgcctttacaatcgaccacgccgtatgcagtcacatcttctaccggctcaaccataatctggctattgccggtttcgtcaaaacggcggatcatttcagccaggttatcctgagacaggtcggactcatattcgtcaagaataacgtctggcagaataacagcgacaggttcgtttccgacaacgggatgcgcgcacaatacggcatggcccaggccttttgccagcccttgacgtacctgcataatagtgacatgcggagggcaaatagactgaacctcctccagaagctgacgcttaacgcgtttttccagcatcgcttccagctcaaaactggtatcaaagtggttttcaatagagtttttagacgagtgcgtaacaagcacgatttcagtaatgccagcagcgatacattcgttcacgacgtactgaattaatggcttatcaaccagcggcagcatctctttcgggatagctttggtcgctggcagcatcctggttcccaatcccgcgaccgggataacggcttttttgactttcgaattaagggcagccatttaaaattctcctggactgttcatgtattgaacgtgttcattaatctgtatcgtgttccagtatatcagtaccagaacaagcctcaggtccaaaaaggacttatattggtataattaagacaaatacttataaatctgccgcagatagtaacactcgtcgggaaaggccggtaaagcaatttccgctcactcttccgtttggtcattccgcagacaacatcaatcgcagacgccctcctgcgccccatatttgacactgccacgagtcgcaacgctggcttaattggttaaggtaggcgttacccaatgttcctagcggcacgccgctgctaatttgaacctgatgagcgcccgtatttaaggtggcgttcaatccggcggagacgagaatcaaatttttgagctcactgtgatagtagccgacaaatagcgggaattgcccaggtaaattggcttgtctgagcagatgatttacctgttttaatagcgcgcctaactccggtaaacggtgcttttgttggcctagctgatcctgcaataagccgttaaatagcgcccgcagcaacaatgcggctaacacgccgttatcgcccgcccgggtgacatccaggcaataaaatgccagttcgttatcagatagcggcgcaatatccagcaccagtccaggctgatcggcggagacgagctgccggtaattaatgcggcaatgagaaatcacctgctgtaccgggggctgcaattcctgcaacaattgcgctgcggcggtcggattactcaccattgcatcccagtcacgaaacaggcgttcttcttcttcaacccgcgagttaaacatattagggtataagcaagcgaatacggtttcccgcaagcggttgagatcttttaccggcttcagcaagacatcttcaaccccaaggcgcaacgctttggcgatatccgccatattttctgttgcggaaataaccagaataggcgtctggtctccgcgattacgtaagttttctaccagtttgagaccgttcattctcggcatagcgatatcacatatcatgagatcaggggtaaaacgccccatcaactccagggcatccaccccgtcgcctgccaatgccgttgtcgctcccaaagaggaaaaccacgaatccagaagcgagcgaaatacaggctcgtcttcaacaataagaatctgttttccgaccaatggctgcgtcatgttctctcccctgactggctttaatcaatagtggcatggtattgccgcttgcgcctgtcagaatttgcttaagtgatcgtaaaaggtacattaaacgtcggtacgcaccaagggtataagttcgtccatctttttctctacggctaactgacccgccgcaatagcggcatgggcgcgatgaaaatccagcgtagagatttgcggacagaatggttgaatgagaatatcaggcggatcgccagccatacggttacgtttaagacgattttccaacacctggatggaggttgtcatgatttccattgccccaggcgaactcacgccacggcgtgaagtcaggctactgaaacgttcttttaaacgcttatgccagggcagcgcatcatcgctctcttcattgatattcccgacatttacagagagcaaatcttgctgcatgaggtgggcatcatgttgcaggtctaccgcaataacgatatcagcccccagcgccctggttaacgaaacaggtaccggattaacgactgcgccatctaccagccagtaaccgttatgttcaaccggagacatcagccctggcatactgcacgacgcgcgtacagcaaggtgtagatcgccttcagtaaaccatagctctcgtcccgtgctaagattcgtcgcgaccgcgccaaaacgtcttgaacagtggtcaaaatccgtgacgggcataatatcccgatagtgattaaatacgcgttcgccgcgaagcaaccctcctctgccccaggatacatccatcaggcgtaaaacatcccagtagcggaatgaacatacccactgttcaagcgccgataatttattacaggcatacgcggcgccgaccagtgaacctattgagcatcctgcaacgatatcaatatcaatgcctgcttgcttgagggctttgatgaccccaatatgagaccatcctctcgctgcgccagatcccagcgccagccctattttcatttttctcatcgtacttaacgacttcccctggcttcaagacgtagcaacatcgccactgctcagttaacataatgccaccctggcgttcaacgccgttttttatattcagggagattattgtgtctcagccttgtccctgtggtagcgctgacgagtatagcctatgttgtggtcgtattgtgtccggagaacgagtagcacccgatccgtcacatctcatgcgctctcgttactgcgcttttgtgatgaaagacgcagattacttaattaagagctggcatccaacctgcaatgcggccgcgtttcgtgatgatatcatcgccggatttgccaataccaggtggctcggcctgactatttttgaacatacctggtcagaagcagaaaatacagggtatgttagttttatcgcgcgtttttccgaacaagggaaaaacggggcgattatcgaacgttctcgttttatcaaagaaaacggtcagtggtattatattgacggtacccgcccgcagttgggtcgaaatgatccctgcccgtgcggttcaggcaaaaaatttaaaaagtgctgcggccagtgacgcctgacagtatcgatacagcaaacactctcaacaggatttttccggcaatgcaatcactacaacgtaaagttctgcgtactatttgtcccgatcaaaaaggccttatcgcgcggattaccaacatttgctataagcatgagcttaatattgtgcaaaacaatgaatttgttgaccatcgcaccggacgcttttttatgcggaccgagctggaaggcatcttcaatgattccactcttctggccgatctggacagcgccttaccggaaggctctgttcgtgaactcaatcccgccggacgccgtcgggtagtgattctggttaccaaagaggcgcattgtctgggcgacctgctgatgaaagccaactatggcgggctggatgttgaaatcgccgcggtcattggcaaccatgaaacgttacgctcgctggttgaacgttttgagatccctttcgaactggtcagccatgagggattaacgcgtgaagagcatgacacgaagatggcggacgccattgatgcccatcaaccggactatgtggtgctggccaagtatatgcgtgttttgacgccaggttttgtggcgcgcttcccgaacaaaattatcaatatccaccactcattcctgccggcgtttatcggcgcgcgtccttatcatcaggcctatgagcgcggcgtgaaaatcatcggcgctaccgcgcactatgtgaatgataatctggatgaaggcccaatcattatgcaggacgtgattcatgtcgatcacacttacaccgcagaagatatgatgcgtgccgggcgcgacgttgagaaaaacgtattaagccgcgcgctgtatcaggttctggcacagcgagtctttgtttacggcaatcggacgattattctttaatcgtcagtaatatgaattgattagctttaatccgttacggatgaaaagtacgcaaacagttcatttcaggcaaaggaatgctttacagcggcgtgtcatttgatatgatgcgccccgcttcccaaaaggaagcgggccagtattaagcattaccccgtggtggggttcccgagcggccaaagggagcagactgtaaatctgccgtcatcgacttcgaaggttcgaatccttcccccaccaccattattcactacagcgatgtagttaactcgatgagcaatgcagaagtttgcacttgtcggggaagggtgagaaccttcgattaaggttcgactcgagcgaaagaacgttgccaacggtaacggcccgtagggtgaggagtgaagcgacgaataatccttcctccaccaccatcttcaagctttacctacaatttgaattacccctggtggggttcccgagcggccaaagggagcagactgtaaatctgccgtcatcgacttcgaaggttcgaatccttcccccaccaccatcgcttcccgtcgcgtatcttatccccgttaagcacagtgtctcatatctctctgtacgggaaggatgagaagcttcgaccaaggttcgattcgagcgcagcgagaaagcgttgccgcaggcaacgacccgaagggcgaagcgcgcagcgctgagtcatccttcccccaccaccataatctcccggcagcgcctcaatcaatcttcatcgcccccacaggcagacttcactccatggcgccatggcttattggttatcttatcaatacttcttcctggcaatctttttcgcctcctttgactgatcaatttttcgccagatgagattaaaggcggcatatgtctcgctaagttgatctggggtgagcgttcccttgagtcggtttctttcggcaatgagcgctgaacaatcatccttagatttttccgtatacatacttgccatgtaataccaaatataggcctgcttattatctttaggcacaccctggcgcccatgagcataaatttccccaagcgctgattgtgccggagtaaacccctgctctgccgctttgaggtaccacttcagcgcattccggctattttcaggcacgcctcttcccgtgctatatgctacgccaagctgatattgcgctttcgcaaaatcctgttttgctgcttttcgataccatgcgatagcctgtctgtcgctttgcgcgacgccgcgaccaaatgcagacatgatgcccagatgcgtttgcgcagcaggcagcccctggcgagcggctttgcgataccacgccagcgcctgttggtagtcctgagaaacgccctcaccctgcataaacatcacgccgatcgcatcctgcgcctcggccaatccttgcgctgcggctctgcgataccactccagcgccaggttgtgatctttcaataagtgataaccgttgtaataccatacgccaaaattgtactgtacctttgccatcacgcgttgcgctgtttttcgataccacgtctgagagtgaacccggtcagcgggatgcgctttatcatagagcgcattcagcggaatgtggcctggcgtatagctgcctggtataccttcattaagccagtaaactgcctgacgataatcctgaggcacgccttcaccataaaaataggcaacgccgagataaagttgcgcggggtagtacatattttccgccgctttacgcatcaagatcgccgtttgctgataatcctgaggaacgccctgaccgtgggcgtacattactccaagcttaaattgtgctgacgaagctgaaccctgtccgcggacaacgcccgcatcattggttggagaggcggcttttcgataccactccagcgctagctgggtattttggggaaacccatcgccatacatataggcgtcaccgaggatttcttgcgtactactatcccctagctctgccgccttgcgataccactccagcgctttttgtcgactaagtggaaaattttcaccatagttgtaatgatagccaaggatgaaataggaaaaatcagaaccttgtttacccgctttctccagccattttatggctagtttataatcaggcttaacgtatcgcccctccgcataccagcttccaagcgagaactgcgcgctttcatctccttgttccgctttttgctctaattcctgaacgtactggcattcttctgagtcggcgggatagcgctcctcgcagacagcagcgtgagccatttttgaaataaatatatttaatattattattttgaaaattgatgaaaaacgcatacaactatccttattgtcgtttatggcgtgattatatgctgcatcatcatttttctgcttacaaaaaactcgcacagatgctgaataaacccaaaaacaaagagtacggattcagatgccagacatggcagacccgctgtaaacgaaacaaggcggcggtcgataaggcatttatgccgcactccggcaaacagccataaaaaaactccgccgaagcggagtttagggcatcgagagaaaatcagtgacgtgcacgaacaatctggtatttgcgggtcagatactcgaccggcacgctccagatatgcaccaggcgcgagaatgggaacaacaggaacagcgtcatccccagtaccaggtgcatacggaagataaaggctacaccatccagatgtgcggatgcgccaccgtggaaggtcacaactgactgcgcccacccgaccagcttcatcatttcactcccgtccatatgctgggcggagaacggaatggtcagcaggcccagcgcgcactgaatcaccagcagcgagagaatcaaaatatctgcgccggtagtggtggcgcggacacgtgggctaaacagacgacgcttgagcagtaaaataccgccaaccagcgtcagcacgccgcaggcgccgccggcaatcatcgccatcttctgcttcacgtcgaccggcagaaaagcttcatacatccagtgcggcgttaacatgcccaggaagtgaccggcgaaaatacccagaatcccaatgtggaacaggtttgacgccaggttcattcctttgcgatccagcatctgactggaagccgcccgccaggtgtactggccgtagtcgtaacgtaaccaactaccgatcagaaataccgatccggcaatgtacgggtagatatcaaagaagaacatattcaggaagtgcattagtgctgtcctccggtggtgatattcagatattgcggcgccacggccccggcaaaacgacgctggtgagcggagatttccgactcgccacacccttgatcggcgaagaatttcacctgctcttcttcccagaccgcatccaacgcctgcggggtatcatcacgtgcttcattcgcaattttttcagccactttatcgctgtcgataacggtattcgccagttttaacagcagatcgaacagcaccgcataacggctgtcacgctgttgcaaacgtgcgctgagcagcgccagaatcggcgcgatatcctgtaaaccccctaacgcttcgcttttcggcaattgcgcaaggtattccagatacagcggcagatgatcgggaagttcgcgactgtcgagctgcaaaccgtgctgctcatactgtgccatcaggtcaaccatcgcctgaccgcgatcgcgggattccccgtgtacatgttcaaacagcagcagcgatgtggcgcgaccacggtcaaacagttcgctataagcggcctgtacatccagcaggtcctgcgcggttaaatcgcgcaggaaaacgcccagagtctgggcatcctctttatccaggttctcagatgacgcgagcgcatcgaacaactcctgctgatgctgccacagggcagcatccgggtactcgagcagacgcgaaacaatgacgagttcaatcatgcgtgcggctccgttttgctggtcacatcaacagcgtcgatgcggcggctgttgaacagattgaatttggtatcagacccgtggcaaccatcgccgaaggtaaagccacaaccgcttttctccgggaatgcgtcacgcgccagttcacgatggctgctcggcaccacaaagcgatcttcataattagcaattgccaggtaacgatacatttcctgcgcctgggcttcgcttaaacccacctcttccagcgcgcgggtatccactttaccgtctacggtttccgcacgtttgtagtgacgcatcgccagcatccgtttcagcgccaacagtaccggctgggtgtcgccagcagtcaacaggttcgccaggtactgcaccgggatacgcagactgtctacatccggcagaataccgttgctgccaagttcgcccgcatcggcggcagactgaatcggtgacaaaggcggtacgtaccagaccatcggtagcgtgcggtattccggatgcagcggcagcgccagcttccagtcaatcgccattttgtacactggcgattgctgcgccgcatcgatcacgctctgcggcacgccgtccttcagcgcctgctcaatgacagccggatcgtttggatcgaggaacacgtccagttgacgctggtacagatctttttcgttttccgtactggcggcgctttcaatggcatcggcgtcatacagcagtacgccaagataacggatacgacccacgcaggtttccgagcaaacagtcggctgaccagcttcgatacgcgggtagcagaagatgcacttctcggacttgccgctcttccagttgaagtaaatcttcttgtacgggcagccggtgatgcacatccgccagccgcggcacttgtcctggtcgatcagcacgatgccatcttcttcacgcttgtagatagcaccgctcgggcaggtcgccacgcacgccgggttgagacagtgctcgcacaggcgcggcaggtacatcatgaaggtgttttcgaactggccgtacatcgccttctgcatgttttcaaagttctggtctttagcgcgtttttcgaactcgccgcccagaatctcttcccagtttggcccgctggtaattttgtccatccgctggccggtaatcagcgagcgcggacgcgcgatcggctgatgtttgctttccggcgcggtatgcaggttctggtagtcgtaatcaaacggctcgtagtagtcgtcgatgcccggcagatgcgggttagcgaagattttacccagcagcagcgcccggttgcccatgcgcggctgtagcttgccgttaattttgcggatccagccgcctttccatttttcctgattttcccagtcattcggaaaaccaacgccaggcttactttctacgttgttgaaccaggcgtattccataccttcgcgactggtccagacgtttttacaggtgactgaacaggtatgacagccgatgcacttatcgagattcagcaccatgccgacttgtgaacgaattttcattttacgctctcctgtacctggtcattgccttcgccatccaaccagttaatgttcttcatcttacgtaccaccacaaactcatcgcggttggagccgacggtaccgtagtagttaaagccgtaggctaactgcgcatagccgccgatcatatgggtcggtttcggcgtaatgcgcgtcaccgagttatgaataccgccgcgctgctgggtaatttccgaccccggcaggtttacgatacgttcctgcgcgtggtacatcatggtcatgcccgccggtacacgctggctgaccactgcgcgtgcggtcaatgcgccgttgctgttgaagacttcgatccagtcgttatcttcaatgcccagatctttggcgtcggtttcgctcatccatacaatcgggccgccacgcgacaaggtcagcatcaacagattatcgctgtaggtcgagtggataccccatttctggtgcggcgtcaggaagttgagcgccttctccggattaccgttggatttacgccccatcaccgctttcaccgagcgggtgtcgatcggtgggcgatacaccagcaaactttcgccgaagtcgcgcatccactggtgatcctgatacaactgttggcgaccagacagcgtacgccatgggatcagctcgtgaacgttggtataaccggcgttataagaaacgtgctcatcttccagaccagaccaggtcgggctggagataattttgcgcggctgggcctgaatatcgcggaagcggattttctcttcttctttattggttgccagatgcgtatggtcgcgaccggtaaactcgctcagcgccgcccaggctttcaccgccacctgaccgttggtttccggcgctaacgtcaggatcatctctgccgcgtcaatcgccgtgttgagcatcggctggcctttcgccggaccgtccgctttggtgtaattaagcttacgcagcaagtccatttcgctctgcgtgttccaggcaatccctttcccgccgttgccgattttctccatcagcgggccgatagaggtaaagcgttcgtaagtcgccgggtaatcgcgctcaacggtcatgatgtgcggcgcggttttccctggaatcagatcgcattcgccttttttccagtctttcacgtccagcggctgcgccagttcagcggcagaatcgtgctggatcggcagcgtcacgacgtcagtctctttacccaggtggcctacacagacttcggagaatttcttcgcaatgcctttgtagatttcccagtcgcttttcgattcccaggccggatctacggcggcagacagcggatgaataaacggatgcatatccgaggtattcatatcgtctttttcataccaggtggcggtcggcagtacgatatcggagtacaggcaggtgctcgacaggcggaagtccagcgtcaccaccagatccagtttgccgtccagaccattgtcacgccactccacttcttccggcttcacaccgccctgtttacccagatccagcccctgaataccatgctcagtacccagcagatacttcagcatgtactcatggcctttaccggaagacccaagcaggttagaacgccagatgaacaggttacgcgggtggtttttaccgttttccggctgctcggcggcaaagcgaatcgaaccctctttcagggatttgacggtatagtctaccggcgtcataccggctttttccgcttcacgcgcaatatacagcgggttagtgcctaactgcggcgccgacggcaaccagcccatacgttcggcgcgcacattgaagtcaatcagatggccgctatagcgggatttgtccgccatcggcgacagtaattcctcggcggtcaccgtctcgtagcgccactggctggagtggttatagaagtaagaggtgctattcatgtgacgcgccggacgctgccagtcaagggcaaacgccagcggctgccagccggtctgcggacgcagtttttcctggccgacgtagtgcgcccagccgccgccgctctgaccaacgcaaccacagaacaccaacatattgatcagcccgcgatagttcatatcgaggtgataccagtggttcagaccggcgccaacgataatcattgaacgcccgtgcgttttgtccgcgttatcggcgaactcccgtgcgatacggatgatctgcgcccgcggcacgccggtgatctgctcggcccatgctggcgtatacgctttggtatcatcataactggcggcacaattttcatcgttcaggccgcgttccagaccatagttcgccatggtcaggtcatacacggtggtgactaacgctgaagaaccatcggccagttgcagacgttttgccggcagtttatgcagcaggacgttatccagcgccacatgattaaagtactctgaaccctcgccgccgaaatacgggaagcccacgtcagcaatctcatcctggctgcccagcaagctgagctgcaattcagtttctgcaccggtagtcccgtcgcgctgttcgaggttccatttgcctttttcgccccagcggaaaccaattgaaccgtttggcgctaccatttcaccgttgctgttgatagcgacggttttccattccgggttattttcctgccccagcgaatcaacgagatcggcagcgcgcagcatacgacctgcggcataataaccatcacgctcttcaagcatcaccagcattggcatgtcggtatagcgacggacataatcggtgaagtactggcgcgggttgtcgaggtggaactcgcgcagcatgacgtggcccatcgccagcgccatcgccgcatcggtcccctgcttcggcgccagccacagatcgcacagtttggcgatttcagcatagtccggcgtcaccgcgacggttttagtgcctttgtaacgtacttcggtaaagaagtgggcgtccggcgtacgggtttgcggcacgttagagccccaggcgataatatagctggagttgtaccagtcagcggattccggcacgtcggtctgctcgccccaggtttgcggggaggctggcggcaggtcgcagtaccagtcgtagaagctcaggcaggtaccgccaatcagcgaaagataacgtgcgccggaagcgtaggaaaccatcgacatcgccgggatgggtgagaagcccgcgacgcggtcagggccataggttttcacggtgtacacgttggaggcggcgatcagctcgttcacttcctgccatgaggagcgaacaaagccgccacgaccacgcgcctgtttgaagcttttggctttatcggcatcttcaatgatggaggcccatgcctctaccggatcgcgatgcagttttttcgcctcgcgccacatcttcatcagacgtttgcgcattagcggatatttcagtcggttagcgctgtagagataccaggagtagcttgccccgcgcgggcagccgcgaggttcatggtttggcatgtcaggacgggtgcgcgggtaatcggtttgctgtgtttcccaggtcaccagaccatttttgacataaattttccagctacaagaaccggtgcagttcaccccatgggttgagcgcacaattttgtcatgctgccaacgttggcggtatccgtcctcccagtcccggtttgtttcgagaagctggccgtgcccatcggcaaaggtttcgcccttctgcttgaagtagcgaaaccggtccaggaatttactcatcgggtttctcctgtgtggaaccttacggctctctgataaatcgacattgcttaactaagggcgaaggtaacgcgctgaatgggcgtgagaattgataacgatcaaggcggacagggatgcaaatggcgcgcaaacctcctgcatactcctttgggaggaggagttttatttatatatattactgatttaattacataaaattaaatttacgcacgacatgaatgttaaattttcaacaagtgggtattaaggggtatccccctggatgaccgataaagatgtgcgtggttagccctgccgcgtctctcttcttgattataagtatgttgtaactaaatacagataaaaaaaagcgcggtctaacgccgcgcaaaggataatcaaaagttactttttatttttagaatgacgtccatataccgcccaggtaataacgacgcaggcgatatagaaaataagaaagactttcatcgcgccgactggagaaccggttaatgctaaagatgaaccaaacgctttcggaataaaaaagccgccaatcgcgccaatcgcggaaataaagcccagcgccgccgccgtatcagttgccgcttcacgcatggctctttcttccgacccgccttccgcttttacccggtccattgtcagtttacggaagataacggagatcatctggaaggtagaaccactccccaacccagccgtcaggaacagcgccagaaataccccgtagaacgcgataaagctaccgccaacgccgccagtaggtaatgtcaggaacagcagaccgctgaaaatcgccatcaggacaaagttgataagcgtgacgcgagtcccccccagacggtcagaaattgcgccgcctgccgaacgcgccagcgcgccgataaacggaccgaaaaacgcataatgcaggatctgcacatccgggaattgcgttttagacagcatcgcgaaccccgcggagaaaccgataaacgatccgaaggtcgccagatacagcagactcatgatccacagatgaccacgtttgagcaccggcagttgctcttttagcgaggccttagacgtcgccagttcgttcatgccgaaccacgccgccagcgtaaaaatggccaggaaaggcacccaaatccaggccgcgttcgccagatagagctgagaaccgtccggctgctctacaccgtggctgccaaaggcggcaaagatagagagcgaaaccaccagcggcgcaaccagttgcatcacgctcacgcccatattgcccagaccaccgttcagacccagcgcgccgccctgcttttgtttaggaaagaaaaagctgatgttcgccatactggaggcaaagttcgcgccggcaaaaccacacagcaaggaaataataatgaaggtgctaaatggcgtactggtatcctgaacggcaaagcctaaccatacgcagggcacgatgaggataccggtactgaacgctgtccagcgacgtccgccaaatagcggcaccataaaggagtaaggcacccgtagcagcgcgccggaaacagatggcagcgcagtcaacataaagagctgatcggtcgtaaaattaaatcccactttcggcaggttcaccgccactgcgctgaatagcatccagacgcaaaacgccagcagtaaacacggcacagaaatccacaaattacggctggcgacacgatggccgcgctgctgccagaatgccggatcttccggacgccattccgtgataacagcgccagttgccctttccggggcggataagtgactcatagacacctctgattcttgatttgatgtctgccacattagggtttactgccgaaggtaagttgatataaatcaaaggaaaagtcgtcatcaccggcgactaaaaatagttattacccttaatgagtaggctattttggtaaaaaagctgtggtttttcaccatgctgtgtctgtctactccttcccgtcgcagatacctctctacagcggcaattaaggagtaactcgttataggtatgggtatactccgctgtatcgttgagaatagcggcacagccgattgacgcccctcttttttgctacgttttttcggcgacattaccccgaagaaagaaggtaacatgtttaaacggtgtttctctcctcttacgctggttaaccaactggcgctgattgtcatgctctctaccgctatcggcgtggcggggatggcggtttccggctggctggttcagggtgtgcagggtagcgctcatgcgattaataaagcgggctcattgcgtatgcaaagctatcgactactggcagctgtcccgctggatgctaaagatcaaaagctgctggatgagatggagcaaacggcattcagccctgaactgacccgcgccgctgagcgagacgggcagcagaagcagcttaaagcgttgcaggattactggcataacgaactctcgccagggctacagcacgcgcaaaacgcgcacgcggtcgcagaagatgtcacgcgctttgtggcgggcctggatcgcctggtgacgtcgttcgaccatacgactgaattgcgtatcgaacgcgtggtattagttcaccgggtaatggcgatctttatggcgctattgctggtatttacgattatctggctacgtgttcgccttttgcagccctggaaacagttgttatcaatggcgcgcgccgtcagtcagcgcgactttacccaacgtgccaatatcagtggacgcaatgagatggccgcgttgggttctgcgctcaataatatgtctgaagaactggccgaaagttatgcggtactggaacagcgcgtacaggaaaaaacagccggtctggaacataaaaaccagattctctcgtttttgtggcaagccaaccgccgactgcattcacaggctccgctatgtgagcgtctttcaccggtactgaatggcctgcaaaatttaacccagttgcatgatattgagctgcgggtctatgacctggaagatgaagataatcaccaggaatttacctgtcagtcggacatcagttgcgatgataaaggctgccacctttgcccacgtagcgccctgccgatgattaacggcggcaccaccttaaaatggcggctcaccgactctcacacccaatacggtattttgctggcgacgctgccctatggacgccatctcagccacgatcaacaacagttggtggacacgctggttgaacagcttaccgcgactctggcgctcgacaggcatcaggagcgccagcagcagttgattgtcatggaagagcgtgccaccattgcccgcgaactgcatgattctattgcccagtcgctctcttgtatgaagatgcaggtgagctgcctgcaaatgcagggcgacgtgttaccggaaagcagccgtgagttactcagccaaattcgcaatgagctaaactgctcctgggcgcaactgcgcgaactgttaaccactttccggttacagttgacggaacccgggctacgtccggcgctggaggcaagctgccaggagttcagcgcccggtttggctttacggtaaaactggattatcagcttcccccccgcctggtgccttcacaccaggcgatacacctgttgcaaattgccagggaagccctcagcaacgcccttaaacactctcatgccgacgatgtggtggtgacagtgacgcaatgtggcaaacaggtcaaactaaaagtgcaggataatggctgcggcgtcccggaaaacgccgaacgcagtaatcactacggcatgatcatcatgcgcgatcgggcgcaaagtttgcgcggcgattgccaggtacgccgacgcgagactggcggaacagaggtcactgttacttttattccagaaacaaacttcacagaaacccagggagatacccatgaataatcaggaaccggcaaccatcctgttaatcgatgaccatccgatgctacgcacgggtgtaaagcagcttgtgagtatggcgcccgatatcagcgtggtcggagaagccagcaacggtgagcagggtattgacctggcggaatcgctcgatcccgatctgatcctccttgatttgaatatgccgggaatgaatggtctcgaaacgctggataaattacgcgaaaaagcgctgtcaggacgtattgtcgttttcagcgtatccaaccatgaagaagatgtcgtcacggcgctaaagcgcggcgcggacggttatctgttgaaagacatggagccggaggacttgctcaaagcgttacaacaggccgccgccggcgaaatggtattaagtgaagcgttaacgccggtactggcggccagcctgcgggccaaccgcgccaccaccgatcgcgatgtaacgcaactcaccccgcgtgagcgcgatattctgaagctcatcgcgcagggattgccgaataagatgattgcccggcgtctggatatcaccgaaagtacggtcaaagtgcacgtgaaacatatgctcaagaaaatgaagctgaaatcgcgcgtggaggccgccgtctgggtacatcaggaacgcatcttttaattattgctcctggaacggttgccaatgcggattatcgtccggcatcgtgataaacggttcagtcagcgcgagcgtgatctcattggaagagacacgctgacctttttcatcctcaaccaccaccgataaacgccagcgatttgccgcgccttcgcggtgatcccaggccggcataatgattgtccagccctcggtactgcgggtgtccgttcctgccgtcaaacttaatgcctgtgtatcgccctgccagctcaaatgacgaataccgtgcacgctgcgcacctgcaattttaacgcaaccgtctcaccaggcgtaagatcccagggcggcgtcgccagaaaaaccgttaacgttttacgctgccgatactccattgtcggcagcgagttacgttgcggcgtatcatagcggctaccgcgtaatgactggctttgcgccacttcactggcggcaagctgctttttgagcggcacgccgaagcggtagttaagcgtcagccccaggttattttgactgaccccgctctcgccctgtttgtgctgggcggtcatggtaagcaaaggtactggcgtatagttgagacccagttttaacgcgacaggattgtgataccccgttccggagtcaaacagatccacgctatcgccaaagtactgctccagactaacgctggtattgatatgctggtaaaacggcaggcgcatttgcgcgttgatatcatatccgcgcgccattcgctgttctaaggtcgccgtatgcgtctgccagtcggcaaaaggctgataatagttggcggataaacgcaaatattctccccacgcctccgcgccaaagccggcgcgctgtagattttcatccagcagattatcgtaaaaggtattatagccaagaagccagccatcctgcgcccagcgctgtcctacgccaatgttgcttaccagtccgtcagtctgttgcgtaagaccaagctggctccaggtcagatagcgctgtttatcctgtaaagggataaaccagcttccgcgactgccgttaaaatgaccttcgttatcgacgttaatatccacgctggcgctgccccaggctgatagccagctttcaagctgctggttaacctgctcgctgaccacatcgcgtacctgtccgaaagcgaattgccgcgcctgttcaccagtatccagatcgttatttttcatgctggcttcgccaaacgctttggccatctcggcaaaatgcttttccccttcgtgggattccggcatcatgcctaaatccggcagacggttttgcgtgaaaggatcttgcgcctgcgcacggatcgtaccgctggcagccagcaagagaagcgagagtgagaatgaacgaaaaacaatacggctcaacgtgtcggcaacttctacaacaaaagataagaggaatgacatcagagtaaaccataacgtgtccggacaggttttgcagccttttctcgtgcttccaggaatatccttattttttccgcagagcgtcccgggattttatccacgcatttggcggtacccggttcccgaggtaacataacgccattgccgacaaaatttctcaaggagaagggttatccatgcaaaatatcgtcattatcgctaacggcgccgcctacggcagcgaatcattatttaatagcctgcgtctggccattgcgctgcgcgagcaggaaagccatctcgatttacgcctgtttttgatgtcagatgccgtaaccgcagggttacgcggtcaaaaaccagccgaaggctacaatattcagcaaatgctggaaattctgaccgcgcaaaacgtaccggtaaaattatgcaaaacctgtgcggacggacgtggtatcactcccctgccgctgattgacggtgtggaaatcggaacgctggtcgagctggcgcaatggacgctggcagcggacaaagtgctgacattttgaatctgtacgcgggaaaagctcccgcgtcaggatagacttccggcaagaaaatcaggctaacacgcgagtaataccgcgtttattttttcttatgccatttatcatcctcgcctttttcataatcgtttttaaccgccgcccaggcgactttgtgtgcggtttcctcgcggctggcgtcatcacgacgatcggctttatctttatattgctcccaggcgctattaaacgcttctttgtaaatgtcctgggcatgggctggaagaacattccgcacattatcgggtaaatcacttttggctttatacggcatcagcgcctccgtcttcagggaaaacattaagtgtggtaaacaatgcgttattacgccagtcgaggaggatttttgctttttacggaaattaactttttgttatttaaacactgttaaaacaagatgcttgttttactgaccttgaaagaaaaaaatcgtctacgccgtaaaactacgtaaaaaaccactaaaaaaatacaaatttctgctatttttaccttctttactctttccaaaatattaacacctgcacaagggagaccctcatgacacatgcctgtgaggcggtgaaaacccgccataaggagacttcgcttattttcccggttcttgcgctggtagtgctgttcctttggggaagcagccagtcactaccagtggttattggcatcaatatccttgcacttattggtattttaagcagcgcatttagcgtggtccgtcatgccgatgtattagcgcatcgactcggcgaaccctatggatcgcttattttaagcctgtccgtcgttattcttgaggtgagtttaatttccgcgctgatggctaccggcgatgctgcgccaacgcttatgcgcgatacgctctactctattattatgattgtcaccgggggactggtcggtttctcgttgttgttgggcgggcgtaaattcgcaacgcaatatatgaatttatttgggattaagcagtatcttatcgcgctgtttccgctagcgattattgtgctggtttttccaatggcattgccgcaagccaatttctctaccggtcaggcattattggtcgcgttaatttccgccgcgatgtacggcgtatttttgttgattcaaaccaaaacgcaccagagcttatttatctatgaacatgaagatgaaggcgatgatgacaatccacaccacggtaaaccctccgcgcacagtagcggctggcatacggtctggttactcattcatttaattgcggtcattgccgttaccaaaatgaatgccagcccgctggaggcgttgctgaccagcatgaacgccccggtcgcctttaccggtttcctggtcgcgctgttaattctctcgccggaaggactgggcgcgctgaaggcggtactgaataatcaggttcagcgggcaatgaatctgttcttcggatcggtgttggcgacgatttcattaaccgtgccggtcgtcacgctcatcgcctgggcgacaggtaatgatctggtgtttggtttaggcgcgccggaaatggtagtgatggtggcctcgttagtgctgtgccatatttcgttctctaccggacgcaccaacgtgctaaacggcgcggcgcatctggctttatttgccgcctatctgatgacgatttttgcctgatataaaaaagccggatagtatcttatccggcctacacaagctaaaaaccgcaatcagttctcggtatccagctcgtcgaagcttttcaccaaatcatcaatcgcttttatctgggtcaggaactgctccagtttcgccagcggcagcgcggaaggaccgtcgcacttcgcgttagccgggtccggatgcgactccaggaacaggcccgccagaccgacagccataccggcgcgcgccagctcggtcacctgaccacgacgaccgccagaggcggcgccaaatgggtcgcggcattgcagcgcgtgggtgacgtcgaaaatcactggcgagttgccggagacctttttcatcacgctaaagcccagcatatccaccaccaggttgtcatagccgaagttcgcgccgcggtcgcacagaatcaccttatcgttaccgccctcatggaacttatccacaatattgcccatctgacccgggcttacgaactgcggctttttcacgttaatcacagcgccggttttcgccatcgcttccaccaggtcggtctggcgcgccagaaacgccgggagctgaatcacgtcaaccacatcagcaacaggctgcgcctggctggcttcatggacgtcagtgatcacttttacgccaaatgtctgcttgagttcctggaagattttcatcccttcttccagacccggcccacggtaagagtgaatagaggaacggttggctttatcaaaagaggccttgaacacgtaaggaatacccagcttctgggtaacggttacgtagtgctcacaaatgcgcattgccagatcgcgtgactccagcacgttcataccgccaaacagcacaaacggcaggtcatttgccaccttaatgtcgccaatgttaaccactttttgtttcataggatcgccttacacttataggtaaaatgtcggttaattaatgtagaacaatttgcttgtgcgcaatggtgttgatctgcgcacgaatcatttcgctgatcgggtcttccggacactgttcaacgaagtagcttaaatcagtcagcgcaacgtgttcacactcaagctgcgcgtagatcaacccgcggtcacggatttcgtaaggatcttccgggttaaattgcaacaatgcttcgctaacgcgcagcgccagctccatttgccgttcctccatcagcgaggatttcagcgtatccagtagcttacgaatcacttcggcgttatccgcttcgtccaaatcttcattaaacaactcggcgaccggactaatattgccttttaaccagacttccagagtatgttcatcaagcgtttcaccgttgaacgggttaatcagccacatttccccttccagcgattcaatacgcaaaatcaactgcgttgggaagataacgggcaccaacggcaaatcaagacggtttgctatccataataaaatagcgcccaacgataccgcgctcccctggcgttttttcaggactttatcgagccataaagcatcagaaagacggtagacgccgcgggaatccgtgaacccccactcgccgtaaaaaagtgccagcaatttttccagttgctcatcctgagacaggagctggctaatttcttcctgcgccagactgaccagacgttccagttcgtcgtagacaaactgcgtgggaaaatccaggcgaatcatctctgatgccaggatcatgccatcacacagcggcgcattgttaaattcgaaatcagctaacgacctcatgacttaccccagtaacggtatttttgtggtggcgagtttaatgatgatgtacagcaccaccagcgccagcgggaaagcgataaaacgcgcctgctggctgcgcgcctgacgataatcaagcgcaataaaacccaaaacgatgtagatgataacgccaaacagtttttcagtcagccatgagcccgactccgtgaatggcaggatgtgcgttttaacgattaacccaataccgctaagcagtaacagggtatctatgacgggaggcacgattcgtgtccagcgcgcggcggccaacgcatggccgcaatagcgccaccagtaacgagcgacaaacaaactgacggagagcgcaacacagataagatgaagcgtgagcaacattgcaattgtcatggcgtaaaacgtccgcaggtcacgcgttcattaccaccataatcacgacacgtttctacatccgagtaaccagaccgcctgaaaaccgctcttaccgcttcgccctgctgccaaccgtgttccagcagcaggaagccgccgggcgttaacatctggcgggcgttatcgataatatgcgtaagatccgccataccgttttcgtccgccaccaacgctgagcgcggttcaaagcgtacatcgccttcgctaaggtgcgggtcctgcgcgtcaatgtagggcggattgctgacaatcatgtcgaactgctgccccgatagcgcgctgaaccaacaactttgcagtatacgcacattccggatagccaaatgttccgcgttgcgtatcgccagcgcaaccgcatcaggcatacgatcgaccgcagtcacctcgcaatccggtcgctcgcaggccagcgccagcgcaatcgcgccggttccggtgcctaaatccagaatacgacaggtttttaccggcaatcgcgccaacgcctgttccaccagacattcggtatccgggcgcgggattagcgtggcgggagaaacgaagagcggcagcgaccagaattcgcgtaagcccgtcaggtacgcaataggttcgccctgtttacgccgctgcagcaggtccgcgagctgttgttgctggacgtcggtaagcggcgcttcgccaaaggccatgatatacgtccgccccttgcccgtaacgtactctagcaggatctcggcgtcgcgccgggggctgtcgctgtcccggagctggtttaccgcctcatgcagccagtgctgaaaatccattattcctgctcggataaggcggctaacaggtcagcctggtgttcctgaacaatcggctcaatcagcatatccagcttaccttccatcgtttcatcaaggcgatataacgtcagattaatacgatgatcggtcacgcgcccctgcgggaaattataggtccggttacgatcgctgcgatcgccgctgccaagcagattgcgtcgcgttgacgcctcggcctgctggcgttttgccgtttcggcggcgtgaatgcgcgccccgagcaccgagagcgctttcgctttgtttttatgctgcgaacgctcgtcctggcattccaccacgatgccggtcggcaagtgggtaatacggatagcggagtcggtggtgttaacgtgctgaccgcccgcgccggaagaacgaaacgtatcaatgcgcagatccgccgggttaatatccggcagctcggcttccggcagctccggcatcacggcgacggtacaggcggaggtatggatacgcccctgcgactcggtcgccggaacacgctgtacgcggtgtccgccggactcaaatttcagtcggccatacacgccgtcgccgctgattttggcgatgatctctttataaccgccatgctcgccttcgctcatgctcatgatctccacgcgccagcggcgcgcttcggcataacgactgtacatgcggaacagatcgccggcaaacagcgcggcttcgtcgccgccggtaccggcgcgaacctcaaggaacgcgtttcgttcatcgtccggatctttcggcagcagcagtacctgtaactgttgctccagttgttcgcttttttctttcgcttcgcgcagttcttcctgcgccatttctcgcatttcaggatcgtcgagcatcatctgagccgtctcgatatcgtcctgaacctgttgccagtccgtaaaacagcgagaaacgtcgcttaattgcgcatattcgcgcgacaatgcgcgaaagcggtcctggtcggcgataattcccgcatcgcccagcaacgcctgaacttcctcatggcgttcgtgcagggcttccagtttggcaacgatagaaggcttcataggcgtaaattcaccctgtaaaaaagtgtggtgtgtgctgctactccagcccgaggctgtcgcgcagaatattcaggcgttcgtcatccccgtcacgggcagcctgttgaagtgatttcgttggcgcatgaatcaggcggttggtcagtttccatgccagatcctgcaagatggcttgcgcatcaccgccctgttgaagggccgacagcgctttggtagtcagttcgtcacgaatctgctccgactgactacggtattcccgaatggtctcgctggccccctgggcgcgtagccaggccataaactcgctggcttcctgctcaacaatcgtttccgcttctactgccgcagcctgacgctgcgccagattatgcgaaatgatgctctgtaaatcatcgacgctataaagataagcgttcgccagtttgccgacttccggttcaacgtcgcgcggtacggcaatatccaccagcagcatcggctggttgcgacggctttttaatgcgcgctccaccatgcctttaccgataatcggcagcgggctggcggtcgaactgataataatatcggcatcctgcaaacgggcgtcgatatcgctgagcgagataacctcagcgcctacctcatccgccagggcttgcgcgcgctcgcgggttcggttggcgataatcatcttttgtactttatgctcgcgcaggtgacgcgccaccagttcaatggtttcgcccgcgccaactaacagtacggtgaccgtcgagagcgattcaaagatttggcgggcgagcgtacaggcggcaaacgcgacggagacggcgctagcgccgatatcggtttcagtccgcactcgcttagcgacggaaaaagacttctgaaacattcgctccagcgcgctggcgttaaggtggcctttttgcgaatccgcaaacgcttttttcacctgaccgaggatttgcggttcgcccagcaccagtgaatccagaccgctggcgacgcgcatcaggtggctgacggcgtcattgtcctgatgccagtacagactgttgcgcagatcgtcctcgttcaggttatggtaatcgcataaccagcggatcagcgcttcttgcaggttatcctgctcttccacgctcagatacagctctgtacggttacaggttgacagcacgaccccgccctgcaccattggctgcgcaagcaggctgtccagcgcctgatcaagcgtgtccggcgaaaacgttacgcgttctcgcagcgatacaggtgccgttttatggttaataccgagcgctaaaagggtcatgtctgcgggagtagtaccagcgttgatatggttagtctgcttgcatcatacaggatgcgcgtggtcaataaaagagagagcccccttttggagtaattggcagcgctcgctaatttgatgatttaagacaacttgaaagtagacgatgtcaccaggcggcgctagcattaaaggctataactgtaaccgatagcaaaaatttgccgaatcgcggcgcgaacgtttttacagcctgcaggttcagttttcaggcctgataagcgtaacgccatcaggcaattattgcaccgtatcacaaggattcgtcatcactatgaccctgcccgattttcgcctgattcgtctactgccgttagcaagcctggttctcaccgcctgtacgcttcctgggcataaaggcccgggcaagagcccggattcccctcagtggcgccagcatcagcaagaggtgcgtcatctgaatcaataccagacgcgcggcgcctttgcttacatctcagatgatcagaaagtctatgcgcgtttcttctggcaacagaccggacaggatcgctatcgcctgctgctcaccaatccgctgggcagcaccgagctggagcttaacgcccagccgggcaacgttcagttggtggataacaaaggccagcgttataccgccgatgacgccgaagagatgatcggcaaactcaccgggatgccgattccgttaaacagcctgcggcagtggatcctcggtctgcctggcgatgccaccgactacaaactggacgaccagtatcgcctgagcgaagtgaactatcgccaggatggtaaaaactggaaagtggtttacggtggctatgacagcaaaacgcagcctgccatgcctgccaatatggagctttcagacggcagtcagcgcattaagctgaaaatggataactggattgtgaaatgatgacccattggccttctccggcaaaattaaatctgtttttatatatcaccggacagcgagcagacggctaccacacgctgcagacgctgtttcagtttctggattatggcgacacactccacatcgaaccgcgtcacgatggcgaaatccatttattaacgccggttaacggcgttgaaaatgaagacaatctgatcgtccgtgccgcgcggctgttgatgaaagtcgcctcggagagtgggcgcctgcccgccggaagcggtgcggatatcagcattgagaagcgccttcccatgggcggcggtctgggcggcggctcatctaacgccgcgaccgttctggtggcgctcaatcatctttggcaatgcgggctttccattgatgaactggcgacgctcggcctgacgctcggcgccgacgtcccggtctttgttcgtggccacgccgcgtttgccgaaggcgtaggcgaaatattaacgccggtgaatccgccggaaaaatggtatctggtcgcgcaccctggcgtaagcattcccacaccggttatctttaaagatcctcaattgccgcgtaatacgccaaaaaggtcaatagatacgttactaaaatgtgaattcagcaatgattgcgaggttatcgcaagaaaacgttttcgcgaggttgatgcggcgctttcctggctgttagaatacgcgccgtcgcgcctgactgggacaggggcctgtgtctttgctgaattcgatacagagtcttgtgctcgccaggtgcttgagcaagccccggaatggctcaatgcttttgtggcgaagggtgtcaacctctccccattgcatcgagagttactctaacgcattcgggtttcaggaagatggcgaaatgacgagtcgccggtcatatatgccgtatttgaccggtgtgaggcatcgataccagcgcacatgaaacgtgaatgaagacgagtaagccgggcaagctgagcttcggtgacaacgtcaccttgttccagacgttgcatcgcgctctttaatacaccgcctggataggattttgcctggcccgcacagttttcggcagattctttccaccaatggacgcatgcctgaggttcttctcgtgcctgatatgaagctttttgctggtaacgctaccccggaactagcacaacgtattgccaaccgcctgtacacttctctcggcgacgccgccgtaggtcgctttagcgacggcgaagtcagcgtacaaatcaacgaaaatgtacgcggtggtgatattttcatcatccagtccacttgtgccccaaccaacgacaacctgatggaattggtcgttatggttgatgccctgcgtcgtgcttccgcaggtcgtatcaccgccgttatcccctactttggctatgcacgtcaggaccgtcgcgtacgttccgcccgtgtgccgattaccgcaaaagttgtcgctgacttcctgtccagcgtcggcgttgaccgcgttctcaccgtagatctgcatgctgaacagatccagggcttctttgacgttccggttgataacgtgttcggtagcccaatcctgctcgaagatatgctgcaactgaatctggataacccgatcgtggtttccccggatattggcggcgtggttcgtgcccgcgctatcgctaagctgctgaacgataccgatatggctatcattgataaacgtcgtccgcgcgcgaacgtttctcaggtgatgcacatcatcggcgacgtcgctggccgtgactgcgtgctggttgatgatatgatcgataccggcggtactctgtgcaaagcagcagaagcattgaaagaacgtggcgctaaacgcgtgtttgcctacgcgacgcacccgatcttctcaggcaatgcggcaaacaacctgcgcaactccgtcattgatgaagtcgttgtctgcgacaccattccgctgaccgacgaaatcaaagcgctgccgaacgtgcgtaccttgaccctgtcaggtatgctggccgaagcgattcgccgtatcagcaacgaagaatcgatttccgccatgttcgagcattgatcgaacccggatctgaaacccgctgcggcgggtttttttgtctgtaacacccttttgtatgacttatgcctccttcacctgccatttagttgacagatgatgcgctcatggatgaaacattattgtgaacaaattattttcctcacatgtgatgcctttccgcgctctcatcgatgcttgctggaaagaaaaatataccgcctcccggttcacccgtgatgtgatagccgggatcaccgtcgggattattgctatcccgctggcgatggcgctggcaattggcagtggcgttgcgccgcagtatggcctctatacctccgctgtcgccgggatcgtgatcgcgctaaccggcggctcgcgctttagcgtttccggccctaccgccgcgtttgtggtgattttgtatccggtatcgcaacagtttggtctggcgggcctactggtcgccacgctgatgtcgggcttcttcctgatccttttcggcctggcgagactggggcgattgattgaatatatcccggtgtcggtcacgttgggttttacctcagggattggtattaccatcggtaccatgcagattaaagattttcttggtctgcagatggcccatgtgccagagcactatttgcagaaagtcggcgcgctgtttatggcgttgcccaccgtcaatattggcgatgccgccattggcgtggtaacgctgggaacgttgattttctggccgcgtctcggtattcgtctgccaggacatcttcccgcgctgctggctggttgcgccgtgatggggatcgttaatctgctgggcggcaatgtggcgactatcggctcacagttccattatgttctggctgacggcactcagggcaacggcatcccgcagctcctgccgcaactgatgctgccgtggagtcttcctggctccgatttcacgctaagctgggattcactgcgcgcgctgctgccagcggccttctcgatggcaatgctgggggcaatcgaatcattgctctgcgccgtcgtgctggacggcatgaccggcaccaaacataaagctaacagcgaacttatcggccaggggctggggaatatggtcgcgccgttctttggcggcatcaccgccaccgccgcgattgcccgctctgccgccaacgtccgcgctggcgcgacctctcccatctcggcggtaattcacgctatcctggtcattctggcgctactggtcttggccccgctactctcctggctgccgctttccgcgatggcggcgctactgctgatggtggcatggaatatgagtgaagcccataaagtggtggatctgttacgccatgcgccgaaagacgacattatcgttatgctgctgtgcatgtcattaacggttctgtttgatatggtcatcgccatcagcgtggggattgtccttgcttccctgctgtttatgcgccgtattgcgcgtatgactagacttgcgccggtcaatgtcgatgtgcctgatgatgtgctggtgctgcgtgttatcggtccgctctttttcgccgcggcggaagggctgtttaccgaccttgagtcacgtattaagggcaaacgtatcgtcgttctgaaatgggacgcagtaccagtgctggatgcaggcgggcttgatgcttttcagcgttttgtgaagcgtctgccggaaggttgcgaattgcgtatcagtaacctggagttccaaccgctgcgcacaatggcgcgtgccggtatcaaacctattcctgggcgtctgaccttcttcccgaacaggacggaggcgttagcggatttactcagttaatggacaatgcccggtggcgataacgcttaccgggcctgaaccggttagctatgacgacgattgtcgttacggcggcaacgtttgtcatagtgacgtacccaccaatatttgtcgctcacctgctcatgcccccctacacgagcccccgccagccaaagaactgcaccgacaaaaatgctcagtattgcgccatgcgcaaaaaattgcggcaaattaaactgcggcagttggtttaaaatagagtaacccacgccgacaaccatcacgaccagccccaaccccatcagcacgttaccgaataacgaagcgtttttgcgtttcatatgtcacctccggaacttttgggttgtttttaggaaatccccctaaactttatgtgtaaagtatagacaacactttcgtttgtaagtgcgggtgcgatcacaaatgtaaagtttcatttaacaaaactttacaaataacacactgaacagtttacatttttaataatcaatgctggcaattatttaatttacttcagagtgtcgctgtgttttgtcaagcgggcagacagacagtaaactacgcgccagttatggatctactcaggacaaaaaacgtggcaattaaattgattgttggtctggcgaatcccggtgcggaatatgccgcgacgcgacacaatgcaggcgcatggtacgtcgatttactggcggagcgcctgcgcgcgccgttgcgtgaagagcctaaattctttggctatacctcacgcatcacgctggaaggggaagatgttcgcctgctggtacccaccacgttcatgaacctcagtggtaaagcagttggcgcaatggccagtttttaccgtattcagccggacgaaattttggtcgctcacgacgagctggatctccctccgggcgtcgcgaaatttaaacttggcggcggccacggcggccacaatggtctgaaagacatcatcagcaagctgggcaataatcccaactttcaccgattacgcgttggaattggtcatccaggcgataaaaataaagttgttggtttcgtgctgggtaaaccccctgtttctgaacaaaaattaattgatgaggccattgacgaagcggcacgctgtacggaattgtggttcaaagagggtctggccaaagcaacaagccgtttgcatacctttaaggcgcaataaccagtgatgtgcggcatttttgccgcacgccgtgtataataggcgaagttatttccatttctgcaatctgttttctataacaggttgattattaagatattaaggtgagttaaatcatgggattcaaatgcggtatcgtcggtctgcccaacgtcgggaaatccaccctgttcaacgcgctgacaaaagccggtattgaagcggcaaactttccgttctgcactatcgaaccgaataccggtgtcgtgccgatgcccgatccgcgtctggaccagttggctgagattgttaaaccgcaacgcattctaccaaccacgatggagttcgtggatatcgccggtctggtaaaaggcgcgtccaaaggcgaagggttgggtaaccagttcctgaccaatatccgtgaaactgaagctatcggtcacgtggttcgctgctttgagaacgacaatatcatccatgtggcgggtaaagtaaacccggtagaagatattgatgttatcaataccgaactggcgctggctgacctcgatacctgcgagcgcgctatccatcgcgtacagaagaaagccaaaggcggcgataaagacgccaaagcggaactggccgcgctggaaaaatgcctgccgcacctggccgaagcggggatgctgcgttcgctggacctgacggacgaagataaagcggctatccgttatttaagcttcctgacgctgaagccgacaatgtatatcgctaacgtcaatgaagacggttttgaaaataacccgtatctggaccaggttcgcgaaatcgccgccaaagaaggttcggtcgtggttccggtgtgtgccgccgtcgaagctgatattgctgagctggatgatgacgagcgcgacgaatttatggctgaactgggtctggaagagccggggctgaaccgcgttattcgcgctggttatcgcctgctgaacctccagacctacttcaccgccggggtgaaagaggttcgcgcatggactattccggttggcgcaaccgcgccgcaggcagcaggtaaaatccataccgacttcgaaaaaggctttatccgcgcccaaactatcgcttttgacgactttattacctataaaggtgaacaaggcgcgaaagaagccggtaagatgcgagcggaaggcaaagattatatcgttaaagatggcgatataatgaacttcctgttcaacgtctaaataaaatttgttgtctcgtgaggttttgctgaatctcataagaggcaaagaaagtcataaaatccacgcagccgcgtggattttttatttcataatatctcaactcatactgacaggctcaattaacgcagagctaacagggtaagttcttttcttaattaccagtcgacattcactgtatggttataaaaaggatgctgatcctttagcggcgtctcataacttgggatcgcatcataatcatcttttccccgaacggaataccttcccgcttcgatatcaaaacgatgtttgagccatcccgcaacatgacttgcgaaagcctcttttcttcttaatggccaatcgacagaagccaaattaacatctaataagtaccgcccttctttattaaccttgatcattccagcctgcagtaacgcccgtaccacctgggattggttatcatgaatccagacccaggcatttccaaattccattgcataactatcatttaaaaaatctttttttgaatataattcacttacataatcattgatagagtcagcataattttttactttagatgcagataaatcaaaaaaagattcaaattcgaaagtattgtcattaatacaggacagtaacgcacccggttccgagagctgggtccatgattgtaaactctctacagctataatgaatttgaaagtatttcttccaatgacaccccggtcaattaaagttaaaatatcgtgagctacggtagggatatcttctgcaaacgggacgattatccccgcaccacttatttcgcttgatctaaaatcaaatcctggggtactttcaatgttttccggaataccatactctttaatatgattaaggaaattattaatatcgccacgatatggccatcgccattcacgttcatgtgtccagtcaatcttacctggaacataagtaacatatctatattgttcaatcaaaggaagagccgtttcatcaagaatacgttccccgtttctgccttgcgagcatcgagcattgttatgctgatccaacccatatatgactggccttgccccataattaaacatttgctctttaggtaaaacgattgcatataaaccgattttttcatttcgttctaatcggcgaacaccagtctctaaataagctgcaatcggcatatctgtaaagcataccaccggggagtcaccatatacggttcgttgcccatttcggtatgaccaggacgagaaaattttatgactgcgtaaagataatcgaagtaaatatttagcatcaatgaaacatgcgtggtgctgattattaaaaccacagtgctcaggcaaataaatatggctaccggtctctaaattaacgtcccgaaaaaaatgaatcaaataatcggataagtcaaatctgatgttatttttcatgggacgccctctttcaaacagtctcttttttgcattcctttaaaaccagcatcactattttatataaaaatcatcacgaagtatgcttcttttaacgatgacctcaaatcctccccccttttgcatcaacttacgcatccctgaaatggcgagaacaggctaaatctacccgaggtcactcgctaaaaacctcatcctggaacaagctcaaccgcccttccccgctacggccctttcgccgaaaaaccgataatgggtataaatataccgctataagctatacccacacacttcacattgtttcttatcgttaatccgatacgcttttttcacattatttctggcggtatacgccggtgcaaagtgaatcgggctcgtttccgcgctcgcgcgtaacacaatgatttaccttgctggcggaacgtcaacggacccgcaaaagcgccttatgcccctggcggagcgtggtgcaaaaaggagaaaaaatacgcgttatgaataacgaggagaccttttatcaagccatgcgtcgtaagggagtgacccgacgcagctttctcaaattctgtagccttgccgccacatcgctgggactgggcgccggaatgacgccaaagatcgcctgggcgctggagaataaaccgcgaattccggtggtctggattcatggactggaatgcacctgctgtaccgaatcctttatccgttcctcgcacccgctagccaaagatgtgatcctctcgctgatttcccttgattatgacgacaccctgatggccgccgccggcgcacaggccgaagaagtctttgacgatattaccactcgctacgccgggaaatacattctggcggtggaaggcaatccgccgttaggagagcaaggaatgttctgtatcagcggcggccgcccgtttattgaaaaactgaagaaagccgccgcgggcgccagcgctattatcgcctggggaaactgcgcctcctggggttgcgtccaggccgcccgccccaatccgacccaggcaacgcctatcgataaagtgatcaccgacaagccgatcgtgaaagtccctggatgtccgccaatcccggatgtcatgagcgccattatcacctatatggtgacgtttgatcgtctgccggaactcgatcgcatgggccgtccactgatgttctatggtcagcgtatccacgataaatgctaccgccgcgcccattttgacgccggtgaatttgtcgagagctgggatgatgacgccgcccgcaagggatactgcctgtacaagatgggctgtaaagggccaaccacctataacgcctgctcctccacacgctggaatgacggcgtctcctttcctatccagtccggtcacggatgtctgggatgctcagaaaatggtttctgggatcgcggctcgttttatagccgcgtggtggatattccccagatgggtacccattcaaccgccgatacggtggggctgaccgcgctgggcgtggtcgcggcgggcgttggcggtcacgctgtcgccagcgcgctcaaccaacgtaaacgccacaaacaacagttagcgcaagccgaacaacagccggacaatgaggataaacaggcatgagtaaccagtatcaaacccagggttataccgttaacgacgccggccgtcgtctgatcgtggacccgattacccgcatcgaagggcatatgcgctgcgaagtgaacattgatgagcaaaacgtcattaccaatgccgtttcctgcggcacaatgttccgcgggctggagatcattctgcaaggccgtgacccgcgtgacgcctgggcgtttgttgaacgtatttgtggtgtatgtaccggggtacatgctctggcatcggtgtacgctatcgaagatgcgattggtatccaggtgccggataacgccaatattatacgtaacatcatgctggctacgttgtggtgtcacgatcatctggtccatttttatcagttagccggtatggactggattgatgttctgaatgcgctgaaagccgatccgcgcgccacctcgcagttggcgcaaagcctttccgcctggccgatgtcatcgccgggctacttctttgacgtacaaaatcgattaaagaaatttgtcgatggcggtcagcttgggatattccgtaacggctattggggacatccacagtacaaattgtcgccagaggctaatctgatgggctttgcccactatcttgaagccctcgacttccagcgcgagatcgtcaaaatccataccatatttggcggtaagaacccccatcctaactggatcgttggcgggatgccgtgcgcgatcaatctcgatcaaagcggcgcggtcggggctatcaatatggagcgcctcaacctggtgcagtcgatcatcacccgcaccgccgactttattaacaacgtgatggttccggacgcgctggctatcggccagttcaataaagcatggagtcaaattggcaccggtctgtcggataaatgcgtgctgagctacggcgcatttccggacattgccaacgacttcagccagcaaagcctgttaatgccgggcggcgcggtgatcaatggcgattttaaaaatgttatgccggtagatttggccgatccgcagcagatacaggagtttgtggatcacgcctggtaccgctatccggacgatcggctgggccgtcatccttttgacggcattaccgatccctggtacaacccgggtgatgtcaaaggcagcgatacgcatatccagcagctcaacgagcaggaacgctactcctggattaaagcgccgcgctggcggggtcatgccatggaagtcggcccgcttgcccgaacgcttatcgcgtatcacaaaggggatgccgccaccatagagtcggtagatcgcatgatgtctgcccttaaactgccgctctccggtatccagtctacgcttggccgtattttatgccgcgcgcacgaagcgcaatgggccgtcggtaagctgcagtattttttcgacaggcttatgaccaacctgaaaaacggcgacctggccaccgccaataccgagaaatgggaaccggccagttggccgcagcactgccgcggcatcggttttaccgaagcgcctcgtggagcgttgggacactgggcgtcaatccgcgatcagaagattgaactctatcagtgcgtggtccccaccacctggaacgccagcccgcgcgatcctaaaaaacagatcggcgcctatgaagcggcattgatgggaacgcaaatggcgattcccgaccaaccgttagaaatcctgaggacgctgcacagcttcgacccctgcctcgcctgttcaacccacgtgctcggcgacgacggcagcgaactgattgccgtccaggtacgctaagcgttaaggaaaagaacgatgactggaaagctatctccacgcgtcggggaggcgcgtgatactgccgtcagccactatgtgtttgaagcgccggtacgcctgtggcactggctaacggtggcctgcatgttggtactgatggtaacaggctacttcattggccggcccttgccgtcggtgagtggcgaggcgacctatctgttttacatgggctatatccggctgatccactttgccgccgcgatgatctttaccgtgttactgctggggcgaatttattgggcctgtgtcggcaaccgctattcacgagagctgtttattgtcccggtctggcgtcgtagttggtggcaaggcgctttcaccgtggtccgctggtatctgtttctggagaaaaaaccggggagcgacatcggacataaccctgtcgcgcaggccgcgatgttcggctatttcctgttgtcggtatttatgatcctcaccggtttcgctctgtttggcgagcatagccagtacgccatctttgcgccgttccgctatgtggttgaatttttctactggaccggcggcaactccatcgatattcacagttggcaccgactgggcatgtggctgatcgccgccttcatcgtcgggcacgtttacctcgctatccgggaagacattatgtccgacgatacggtgatctccaccatgatcaatggctatcgcagccataaattccccaaaccgcacgacaaggagccctcatgaatgcgcaacgcgtagtggtgatggggttaggaaacctgctgtgggccgatgaaggattcggtatccgggtcgcggagcgtttgtatgcccgatatcactggcctgaagaggtagaaattgtggacggcggtacgcaagggctaaacctgttaggttatgttgagcaagccagccatctcctgctccttgacgcgatcgattacggcctggcgccgggcagcctgcgaacctatgccggcgagaaaatccccgcgtatctcagcgccaaaaaaatgagcctgcatcaaaacagtttttccgaagttctggcgctggccgacatccgcgggcatctgccctgtcacattgcgctggtcggcctgcaaccggcgctactggacgactacggcggtagcctgagcgaaatagctcgcagccagctaccggcggcagaacaggccgccctggcgcaactggccgcctgggggatcgtgccgcaggcaaatgaggtcgcacgctgcctgaactataaatgcctgtcgatggaaaattatgagggagtgcgcatacgtcagtatcagacacgtctggagggcaaaagaagtggcgaatgacaccccgttctctgcgctatggcaacgcctgttaacccgtggatggcaaccggtagaggcttctacggtagacgactggatcaaacgggttggagatggcgtcatcctgttaagtagcgatccgcggcgtacgccggaagtcagcgataacccggtgatgattgccgaactcctgcgtgagttcccgcagtttgactggcaggtggcggtggccgaccttgaacaaagcgaagctatcggcgatcgctttaatgtacgtcggtttccggcgacgttggtttttacagacggcaagctacgcggcgcgctcagcggcattcatccctgggctgaactgctcacgctgatgcgttcgatagttgacactcccgcagcgcaggagacagtacaatgagcaacgccttttttcatctgctggggccaggtacgcagcctgatgacgccagtttctcgatgaatcccttaccgctcacctgtcaggtcaatggcgacccaagtatggcggcgctggagcgctgcgctcacagcccggcggtgatggcattgttgaccgatctgcgaggtcagcttgcccggcgcatcccggaagtcggcgacgtgctgggatgggagttatctcccctgaatgccgatgatctctcattcctcaatacgctattgggcgaaggcgaagtctcggtacgcattcagcatccggacgggagtgaaagcgagatccaggagaccatcttctgcggcctgtggcgggtacgccatctgcataaccgacgtctgctgacggatcgtctggaagcgggtagcgcgcccctgacattatggcaagcggcgactgccgatacgctgcctgacgactctctgctgcctccgcctgtcgctggcctgatgaatggactgccgctggcccatgaattattggcgcacgtacgcgatccggcgttgcaaccacacagcatcaatttgacccaactgccgctcagcgaggccgatcgtctttttctggcgcgtttatgcggacacgggaacatccagattcgcatctccgggtatggcgaaagccaaatcaacgccacagcattgcgccatctctggcatgtgcgctgtctggacgcccttaaagggccgttgctcgatagctatgagatttgtcctttgccggagctggtactggcggccccggaagatctggccgattcgcgccagcgcctggatgaagtctgccgatggctggagacgcgctagcgctctcaacaggaacgtcaccggagtccggtactgattagctttttactctctttctgcctacaggagttagcatgtgggatgtcattgacttatcgcgctggcagtttgcgctgaccgcgctgtatcactttttatttgttcctcttacgcttgggctgatttttttgctggccgtcatggagacgatctatgtggtgacggggaaaaccgtctaccgcgatatgacgcgtttctggggcaagctcttcgggatcaattttgctctcggtgtggctaccggcctgaccatggagtttcagttcgggactaactggtcgctctattccaactatgtgggcgatatcttcggcgcgccgctggcgatggaagcgttactggccttttttctcgaatccacttttgtcggtctgttctttttcggctggcagcggctgaataaataccaacacctgctggtcacctggctggtggccttcggctccaatatttcagcattatggattctgaatgccaatggctggatgcagtatcctaccggcgctcatttcaacatcgatacgttacggatggaaatgagcagcttcagcgatctggtctttaacccggtgagccaggtgaaattcgtccataccgtcatgtccggttatgtcaccggcgccatgtttattatgtccatcagcgcctggtatctgctacgtggccgcgagcgtgaggtggccttgcgctcgtttgctatcggctcagtattcggcaccctggccattctgggaaccctgcaactgggggacagttcggcctacgaagtcgcccaaattcagccggtgaaactggcggcgatggaaggcgaatggcaaaccgaacccgcgcccgcgccgtttcatctgattgcctggccgcagcaggaacaggagcgtaatgcatttgccgtgaagatccctgctctgctgggtattctggccacccattcgctggatacaccggttccggggttaaaaaacctgatggacgacgctctgccgcgcctgaagcgtggccgggaggcctggttactcatgaaggagatagcgcaaggcaatcgctcgccgcaggtactgaatgcgtttcaggccgttgagggcgatctggggtacggcattctgctggcgaaatatgccccggatatgaaccatgtgacgccggagcagtatcgtgcggcccagcgtggcgctattcctcaggtggcgccggtgttctggagtttccgtattatggtcggctgcggttcgctgctgttagtggtgatgttgattgcgttgatacagacgctgcgaatgcgtatcgaccagcatcgctgggtattgcgtatgacgctgtggagcctgccgttaccgtggattgccattgaagccggttggtttatgacggagtttggccgtcagccctgggcgattcaggacattctgccgacctggtacgctcactccgcgctgacgccgggccagctggccttctcaatgggacttatcctcggactttacaccctgtttttaatcgcggaagtctatctgatgcagaagtacgcgcgtcttgggccgagcgccatgcaacatcaacaacaagcgcaacaacagggataaaggagacaatcatgttggattatgaaacgttgcggttcatttggtggctgctgatcggcgtcatcctggtggcatttatggtaactgacgggtttgatatgggtgtcggttgcctgctcccgctgatagcgcgcaacgatgacgaacgccgggtattgatcaatagcgtgggcgcccactgggaaggaaaccaggtatggttgattctcgcgggcggggcattattcgccgcctggccacgggtctatgccgccgcgttttccggtttttatgtggcgatgatcctggtgctgtgtgccctcttctttcgcccgctggcctttgattatcggggaaaaatcgccaatgcccgctggcgcgcgctgtgggataccggtctggttatcggcagcctggttcccccagtcgtattcggcatcgcgttcggcaacctgtttttaggcgtgccgtttgccttcacgccgcagcttcatgttgactattttggcaccttctggcagttactctcgccctttgccctactgtgtggattattgagtctgtcgttggtgattatgcaaggaggcgtctggttacagttgaaaacggagggcgttattcgtcaacgggctctgtcggccacccgctacagcgcgctgctgatcgtgatctgcttcctgctggccggttactggctgtgggccggcgttgatggctttgtcttgctcacgcaggatgccaacggcccttccaatccgctcttaaaaggcgtggcgatactccctggcgcatggatgaaccactttatacgctcgccgctactgctcatcatcccgttgctcggtatgatcctgccgattctggctttctatgcctgccttcgcggtcagactattcgtggatttctgttcgcttccctgacccaggcctgcgtcatctttaccgccggcataacgctatttccttttgtgatgccgtcgagtgttagtcctctctccagcctgacggtgtgggacagcacctccagccagatgacgctcgaaatcatgctggtgattgtgctgatttttctgccgatcgtactgctctatacgctatggagctattacaaaatgttggggcgtatcaacctggggaccctccgccgcaacgatcatgaactttattagggagcgggagcgatgtggtatttactgtggtttgtcggcattctgctgatgtgctcactgtcgacactggcgctggtatggcttgagtcgcgtcaacaataaagaggtaaaccggggtcagcgccgtctgactccggttatttttatctttttacgcgcctggtgaagacgtttccccgccgacaggacgacataacattgatacatgtcgttatcataacgtttacttttagaggtgcgtcataattatgacaaatagccaccttgcacatatttcgcatatttaagcaattaattgcataattagcaatatatcacctcttatagcggatagttaaccacttcccatccaaaatcataacgaaaatccaactgcctgccatttttgatctgagttaattgtttaaaaaagtgttaaatttatcgctacatggtgtgatctactatgtaccacggtcaattaaagaacatattacttttatcactaaggtttatcatggataagttatcttacgcttcagatagcagcacatctgcctggaatacctacctgcaacaaatcgagcgtgtggccccttatctgggcgagttatccccctgggtggatactctgcgccacccaaaacgcgctctgatcgtcgatattccggtacaaatggatgatggcactattcgtcatttcgaaggatatcgcgtgcagcacaacctctcccgaggtccgggtaaaggcggtgttcgctaccatcctgacgttgatctcaatgaagtgatggccctgtcagcatggatgaccatcaaatgtgccgcgctgaacctgccatacggcggcgctaaaggcggtatccgcgtcgatccgttctcgctgtcggaaggtgaactggagcgtttgacccgccgctataccagcgagatcggcattatcatcgggccgcagaaagatattcctgcgccggatgtcggcaccaacggtaaagtgatggcctggatgatggatacgtattccatgaatcatggcacgacggtcactggcgtcgtcaccggtaagcctatccatcttggcggttcgctgggccgtgaaaaagcgacggggcgcggcgttttcgtcagcgggctggaagccgcacgtcgggcgaatattgctgttgaaggcgctcgcgttgcggttcagggttttggtaacgtcggcagcgaagccgcgcgtctgtttgcaggcgctggcgcccgtgtcgtggcgattcaggatcataccgcgaccctgtttaacgccaccggtattgacatgaaggcgctcacggcatggcagacagaacacaaacagatagccggtttcccgggcgcggaaactatcgccagcgatgcgttctggcgtctggagatggatattctgatcccggcggcgcttgaaggtcagataactcgtcagcgcgcggaagccctgacgtgtaagctggtgctggaaggggctaacggcccaacctatccggatgctgatgatgttctggccagccgtggtatccttgtggtgcctgacgtggtctgtaacgcaggcggcgtaaccgtcagctacttcgaatgggtacaagatatggccagcttcttctggagcgaagaagagatcaatgcgcgcatggacaaaatcatgaccgacgcgattgtccatgtctgggagaaagcggctgagaaatcctgctctctgcgcaccgcagcctatattgtcgcctgtgagcgcattctgctggcccgtaaagatcgcggtatctatccaggttaaggcgacaaatcattgcgctaaaatccacgtcccggcgtggattttttgtctgtataccccgttttccacgcgcgcgccgataaattctgtctcaataaaatgtctgtttgttcgcaaaatagcggttcaatcacgcgtatctggtcatcgtagactaaggttttgtcatggtaaatgccgttggctttggctcaccgctaaggagataacttgatgatacccccagagattcgccgttctgttctactgcagaaagccataaaactggcgctggcagggacgctgctgacgtttgcatcgttttcggcgactgccgcagacccgtcttccgacactgaaactccgcagccgccggatattttgcttggcccgctctttaatgatgtccagaatgcaaaactcttccccgatcagaaaacctttgctgacgccatacctaatagcgatccgctcatgattcttgcggattatcgtatgcagcggaaccagtccggcttcgatttacgtcattttgttgatgttaacttcaccctgccgaaagcgggtgaaaaatatgtcccgcctgccgggcagtcattgcgtgaacatattgatggcctgtggccggtgctgacacgttcaactaaaaacgtcgaaaagtgggactcgctcttgccgttgcctgaatcctatgtcgtgccgggtggtcgattcagagagatttactactgggacagctactttacgatgctggggctggcggaaagcgggcactgggataaggtggcggatatggtggcgaactttggttacgaaattgacgcctgggggcatattcctaacggcaaccgtacctactacctgagtcgttcgcagccgcctttctttgcgtttatggttgagttactggcgcaacatgaaggtgacgatgcgctgaaagaatacctgccgcaactgcaaaaagagtacgcctactggatggagggcgttgagacattgcagccagggcaacaaaaccaacgcgtcgtcaaactggaagacggcagcgttctcaaccgctactgggacgatcgggatacgccccgccctgaatcctgggttgaagatatcgctaccgccaaaagcaaccccaaccgcccggcaacggagatctatcgagacctccgttctgctgccgcctccggctgggatttcagctcccgctggatggataatccgcagcagctcagtaccattcgtaccaccactattgcccctgtcgatcttaacgctctgctgtatcaactggagaaaaccctcgcccgcgccagcgctgcggcgggcgatcgggccaaagcctcgcactatgacgcgctggccaacgcgcggcaaaaagccattgaaatgcatctgtggaataacaaagagggttggtatgccgactacgatctgaagaacaataaaatccgtgaccaactcaccgctgccgcgctgttcccgctctatgtaaacgccgccgcgaaagatcgcgccgcgaaagtggcggcggcggcccaggcgcatctgctacagcctggcgggctggctaccacctcggttaaaagcggacagcaatgggatgcgccaaacggctgggcgccgttacaatgggtcgctgccgaaggattgcaaaattatgggcaggatgacgtggcaatggaagtcacctggcgctttttaaccaatgtgcagcacacctacgatcgcgagaaaaaactggtcgaaaaatatgatgtcagcagcaccggaaccggcggtggcggcggcgaatatccacttcaggacggctttggctggaccaacggcgtgacgctgaaaatgctcgatctgatttgtccgcaggaaaaaccgtgcgatagcgtaccgtctactcgtccggcatcgttaagcgcaacgccgacaaaaacgccgtctgcagcgacgcagtaacgcgtgtttatagtaggttgacccggtgctgaccgggtcaacgcttacacgttctgcagcggttagccgcgtcgcagaaggcggaaaatcaccagcaccacgatcgcgcccaccacggcgaccaggaaactgtgcagattaaagccgctgatactgccgccaataccaaacatcgtcgccagccatccgccaacgaccgccccgacgataccgagaatacaggtcaggataaatcccccgccatcgcgccccggcataagcaatttggcgataacgccggcaatcaaaccaaaaacaatccaggcgataattcccatttgcgaaccctctttccagtaaaaacgttttaagtataggcaaagtcgagcgtcgcatttctgaacactgatttatctcgcggacataaaaatttatttatcgctattaagttctttctaccgatgccgataacccaacgatagtctgcgtatcaggggttatttcgtgtgagtggttacaatgagcagttcctgaaaaaaaatccattagcgatattaggcgtgctacgggatttaaataaaaatcaggttccactgcgtatttcatgggcgcatggtcaattcatcagtaaaattttggcggtagacccggaaaaactcatcgtggattacggcagccaggaatacgaaaatagcgccgtattacgtgccgggcaggtagccattatcgcagaaacgcagggcgcaaaagtcgagttcacgttgccgcaactcgttacaggcgaatatcagcggctgccggcctttatcacgcccctgccgtcgtcactgtggtttgtccagcgccgggagtattttcgcattggcgcgccgctgtatccgccttattacggcgtcaccacgctaccggacacccgtacgttacgttttcgcctgtttgatctttccctgggcggcatgggcgcgctactggaatccgccatccccgacggactaatcgaaggcgcacgcttttcgcaggttgaactgaacatggggcaatgggggatttttcacgttgacgcccagcttatctccatcagcgagcgtaaggtgattgatgggaaaaatgaaacgatcaccactccccgcctgagctttcgtttccttaacgttagcccggcggtggagcgggagttgcagcggattattttttcgcttgagcgcgaggcccgagaaagagcgaataaagtgcgagaataatcttcacgctaaactacatggcgtccagcgcctgctgaagcttccagatatagcgcggcgcctgcggcgcgggatgattatcaacaacatgttcaaaaaactcgtccgcatccagatcgttaattttttctatcgccttcttcctgtcggatgaaaaagtacgcaataacgcgcctgcgccgttagcataagagacgaccagcgcatattgcatcacctgcggatctttgatgccggccagcggcccattttccagaatgctcagatacgccgcgcccattgagatgttacgctcagggtttttcagctcgctggtggtcggttcgccacgccagcccatacgacggtaaacgtcgcgcccggaggtcgacgcctttaactgcatcaggccaatcgcattagatttactgaccgcgttagggttgccgccggattcaatggcgataatcgcggtgattaaatgcggatcaaccccccatgccgccccggctttttcactgatgggcatccactgcatcgcacgctttacaggcacttcggcattccacggcggattcctgtaatcctgttttgagctacagccagccagtattactaccaaaaaagcaaaccatcttaatttcacgtcatctatccttatagccgtaacttatctgccgaagaggtcataccgccccggccaggcacttaggttgcctccctggtgcgcatccagaaacgtcgcacaacgagggacatcgcctaatatatgcggcatgatatacatttgcattctattgtcagcaaggaattaccatgtctctgtttcatttaatcgccccgtcgggctactgtattaaccaacaggccgcgttacgcggcgttcagcgcctgactgacgcgggtcatcaggtggagaatgacgaggtgattcgtcgccgctttcagcgttttgccggtacggacgcggaacggctggccgatgttaattcgctggcctcgctaacgtcgccggatacaatcgtcatgccggttcgcggcggctatggcgccagccgcttgttggatcgtatcgactggcaggcgctcgcctcccggcaacagcgcgatcccttactgatttgcggtcatagcgattttacggcgattcaggctggactcctggcgcaggccaatgtcatcacctttagcggtcctatgctggcggcaaattttggcgccgaaacgctgaatacgttcaccgagcaacatttctggctggcgctacgcaaggcgcaatttaccgtagagtggcaaggcgacggccctcagtgcgacgcacagggcaccttatggggcggaaatctggcgatgttgatttcccttatcggtacgccctggatgccgactatcgataaaggaattttagtgctggaagatgtcaatgagcatcctttccgggtggagcgtatgcttttgcaactggagtacgccggaattttaaaccgccagagcgccatcgttctcggcagctttagcggcgcggcgcccaacgagtatgacgccggttattctctggagagcgtctacgcgtttttacgttcccgtctgtccgttccgctgattaccggtctcgacttcgggcatgaacaacgtacggtaacgctccctatcggggcaaacgcgatgcttaaaaatacgcgccaggggactcaactcactttatctggccatcctacgctgcaattgtaaaaaaagtccccgacaggctaagtaaaacgctgccctggccgttattatgttaatgttaaataatacgaagtcgtgtgagtcaggagatataaaacgttggatgctgcaacaattattagtctatttattttaggttccatccttgtaaccagcagtatcctgttaagttcattctcatcgcgactgggtatcccgattctggtcattttcctcgccatcgggatgttagcgggtgtggatggcattggcggtattcctttcgataattatcctttcgcttatatggtcagtaacctggcgctggcgattattttactcgatggcggaatgcgcacccaggccagctctttccgggtagcgctgggccccgcgctgtcgctggcgacgctcggcgtactgatcacgtcggggttaacaggtatgatggccgcctggctgtttcatctggatcttatcgaaggtctgcttatcggcgcgatagtcggttccactgacgccgcagcggtcttttctctgcttggcggcaaagggctaaacgaacgtgtaggctccacgctggagatcgaatcgggaagtaacgacccgatggccgtttttctgaccattacattaattgagatgatccagaagcatgaaaccggcctggactggatgtttgccgtccatattatccaacagttcggtctcggtattgtttttggcctgggcggcggttacctgctacagcagatgatcaaccgtatttctctgcccagcggcctgtatccgatgctggcgctcagcggcggtattctgatttttgctttgacgaccgcgcttgaaggcagcggcattctcgcggtctatctgtgcggattcctgttaggaaaccgcccgattcgcaaccgttacggcatcctgcaaaactttgacggactagcctggctggcgcagatcgcgatgttcctggttctggggctgctggtgacgccttccgatctgtggccgattgccgtccctgcgcttattctctccatctggatgattttcttcgcccgcccactgtcggtgtttaccggcctgctgccatttcgcggcttcaatcttcgggagcgcattttcatcagttgggtcggactgcgcggtgcggtgccgattattctcgccgttttcccgatgatggccgggcttgaaaacgctcgcctgttctttaatgtcgctttctttgtggtactggtgtcgctgctcctgcagggaacatcgctgtcatgggcggcgaagagagccaaagtggtcgtgcctccggttggctggccagtatcgcgcgtggggcttgacatccatcctgataatccgtgggagcaattcatttatcagttgagcgccgacaaatggtgcgtcggcgcggcgttgcgcgacctgcatatgccgaacgaaacccgcattgccgcgctatttcgcaataatgaactgtttcaccccacgggtagcactcgcctgcaggaaggcgacgtactctgcgtgattggccgggagcgcgatctgccagcgctgggcaaattgtttagccagtcgccgccggtttcgttagatcagcgtttctttggcgattttatcctcgaagcgaatgcgaaattcgccgacgtggcgcttatctacggtctggaagaaggaacggaataccgggataaacaacaaactctgggtgaaatcatacagcagctgctgggcgctgcgccggtcgtcggcgatcaggtggagtttggcggcatgatttggacggtagctgaaaaagaagataacgtggtacgcaagattggggtacgcgtcgccgaagacgaagcagaataaggtcgcctggcaacgtcgacccgcccccaagtggaccggtcgacgccttagcctgaattaggttacgttgtcacaaacggcacacgcggcgctacggcgcacagtagctcatagcccagcgtgcctgccgcagaagcgacatcatcgaccttaatttctttgccccataattcaaccggcgtgccgattcccgcctgcggacacggcgtcaaatccaccgccagcatatccattgaaacggtgcctactgttctggtacggataccgtccaccagcacaggcgtcccggtcggcgcatggcgtggatagccatcggcataacccgccgcgacgatgccaatgcgttgttcctgagtcacagaataccctccgccatagcctaccctttcacccgcgctcagcgtctgcacgccaataatttcgctactcagcgtcatcacaggttttagtccggtatcggcaatatcccgccactgtcctgacggcgacgcgccgtacaaaataatgcccggcctgacccagtcataatgcgcctggggatgccacagcgtcgctgccgaatttgataacgagtatgcacactgaagaccttccgtcgccagcgcaatacgcctcatcgcctccccgataccttccggatgatcggcctgagcaaaatgtgacatcagggtcatttcaccgacattgcgcattgcccgcaattgctgccagacggtctgcgcccgctcaggctgaaaaccgagtcggttcatgccgctgttgactttgacatagatatccagcggcgcgttaagccgcgcattttgcagcgctttcaactgccagttactgtggatgcaggtggtcagccgataagtgtcatacgcctccaggtcttgcgcatggaaaaacccctccagcatcaatatcggccctttccacccgcgctcacgcagggtaatcgcctcttcaaggttgagcatagcgaaaccatctgtggcgcccagcgcgctccagacgcgttcaataccgtggccgtaggcgttggctttcactaccgaccagacgcgcgcctctggggccgcccggcgcacaatagccaaattttgtttcattacctgtaaatcaaggctggcctgtatagggcgggtcatttcacttcctttatcagttatgcgcgctatgcaaacgttgcgggggggtgggcgtaaaatcggaacggtatcgcgccacgctcagatcgtcgtagggtatcgctggcgtgcgacccgacaagatatcgcttaacaactggcctgaaccgcaggccatcgtccagcctaaggtgccgtgtccagtattaagccacagatttttataacgggtgcgtcctactaccggcgtgccgtccggcgtcatggggcgcaggccggtccagaatgtggcctgctcaatatgaccgccgcgcggaaagagatcgcgcacaaccatctccagcgtctcgcggcgcggttgcagtaagtcggtattaaagcccacgatttccgccattccccccacgcgaatacgcttatcaaaacgcgtaatagcgattttgtaggtttcatcaagaatcgtcgatactggcgcgccgtctggctcgacgattgggatggttaatgaatagcctttcagcggatacaccgggatatcaacaatgcctttaagcatcgccgtcgaatacgatccaaacgccataacatacgcatctgctttaatgatctcatcggcgcatttcacgccgtaaatctgatcattttcgtacagtaatttttccacgggagtattaaagcgaaaggttacgcccgcctgctccgccatgcgcgccagacgctgggtaaagagctgacagtccccggtttcatcattcggtaagcgcagtccgccggttaatttatgcgcaacctcagccagagcgggttcaacttccgccagtcggctggattccaggagctgatacggcaccccggcatcttccagcacggcgatatcacgggtggcgttctcatactgttgcgcggtgcggaagagttgtagcgttcccccctggcggccttcatattcgataccggtcgcggcgcgtagcgttttcagacagtcgcgactatattccgccaggcgcaccatgcggcctttattttccatataatgccgggtatcgcagttacgcagcatttgccacatccacttcagttgaaatggagtgccatccagacgcaccgccagcggcgcatggcgctggaacatccattttatcgccttcagcggtacgccaggggccgcccagggcgccgcatatcccggtgaaatttgtccggcattcgccgcgctggtttcttgcgccgggccggattcgcgatcgatgacggtgacatcatgccccgcctgactcaagtaccaggcgctggtcacaccaactacgccactccccaggatgacaactcgcatagccactccgttaatagtaaaagaacaatcttctgattacatcttgataacccagatgaaaatattattcaacatatgacttttttatggtgacgtgcttcacatataccctaaagacaagcgatcccactggtttgggatctcctgctacgcggcatggctatacagcataaaatgatgccaatacccgattttttgccgttcaatgtggaggaaaccgcaaagaaaagttttcacgatcaagtcgttttttaacatggtgttctatgcttgaaaggaggcgctccatacagagagcgtcgccaacaatgagggtgcgcgaatggcaatgattgattccatgaacaaggacaccacacgtttgagcgatggacccgactggacatttgagctgctggatgtctatctggcagagatagaccgcgtggcgaagctctaccaactggatacttacccgcaccaaattgaagtcatcacttccgaacagatgatggacgcctactccagcgtcgggatgccgatcaactatccgcactggtcgtttggcaaaaagttcattgagacggaacgtctgtataagcatggtcaacaaggactggcttatgaaattgtgatcaactctaatccctgcattgcctacctgatggaagagaacaccatcaccatgcaagcgctggtcatggcgcacgcctgttacggccacaactccttttttaaaaataattatctcttccggagctggacggatgccagctctatcgtcgattacctgattttcgcccgaaattacattacccgctgtgaagaacgctacggagtggatgaagtagaaaaactgctcgactcctgccacgcgctgatgaattacggcgtcgatcgctataagcgcccgcagaaaatctcgttgcaggaagagaaagcgcgacaaaaaagccgggaagagtatctacaaagccaggtgaatatgctgtggcgcacgctgccaaaacgcgaagaagaaaaaacggtcgccgaagcacgccgctttcccgctgaaccgcaggaaaacctgctctattttatggagaaaaacgccccgttgctcgagccgtggcagcgcgaaattctgcgcatcgtgcgtaaagtcagccagtatttttatccgcagaaacagacgcaggtcatgaacgagggctgggcgaccttctggcactacaccatcctgaaccatctgtatgatgaaggcaaagtgacggaacgctttatgctggagtttttacacagccataccaatgtcgtatttcagccgccctataatagcccctggtatagcggaattaacccctatgcgctcggctttgccatgttccaggatatcaaacgtatttgtcagtcccccacggatgaagataaatactggtttccggatattgccggttccgactggctggaaacgctgcacttcgccatgcgcgattttaaagatgaaagctttatcagccagttcctgtcgccaaaagtgatgcgtgatttccgtttcttcacggtacttgatgatgacaggcataattatctggagatctccgccattcataacgaagaaggttatcgggagattcgatcaaaactgtcgtcacagtataacctgagcaatctggagccgaatattcaggtctggaatgtggatttacgcggcgacagatcgctgacgttgcgttatatcccgcataaccgcgcaccgctggataaaggccgcaaagaggtgctgaaacatgtgcatcggttatggggctttgatgtgatgctggagcaacaaaatgaggatggcagcgtagaactgctggagcgttgtccgccgcgcatgaacatgctgtaatcgagatgctgcccggtagtgtttgcgcttaccgggcatcgcgggattatcgtccctgaatcgctaaatcgccgggcagatttttctgcatccgatgccaaatctcgccgctgtcatgcccgtaacgtcgcaccgtttcatacacctggtcgtgcgcgccctgctcgcataacgacgataatttatgatagaaacccagtgccagactgcgcgcttccggattggcgaaatagtggcgaccaatgcgggtgtataaccctttcatgccgttcaggatcaagccgtaaataggattgccggaggcgaatgccagaccacgaaagatgttatagtccagatcggcgaatgcatcggcatggtcggccacttcgtgggcagtggccagtacttcctgcgccttatccgggtgttgacgcaacgcggtacgaataaagatagtagaaatattggtacgcaccgacaacaaattgtcgatcagttgcggaacgctttcatgatcaaggcgggccagcgtttcaaggatattcagccctgacgtttcccaaaaattattaacctttgtcggtttgccatgctgaatggtcagccagccatctcgcgccagccgctgtaacacctcgcgtaatgtcgtgcgcgtcacgccgatcagttcggagagttctcgttctgccggtaagatcgtgccaggaggaaagcggttattccagatactttcaataatatactcttccgcgaaacccgccgggctctgcgccttaatgaccatagtgagatttccattacacagcaaaacatagttgcactcatcataccagacgggcgtaacacctgatagcggacgcaatgaagaaaaaggggatcaaggcaccatttctgatatcgcctgccaatatcgttaaggacttgcttgcattcgtcgcgctcgctactctctgtgtttaaacataaaaacgctatttcatttttctaggtaaggaaaaatttcatggagatctcatggggtcgcgccatgtggcgcaactttttaggccagtcgcccgactggtacaaactggcactacttgtctttttaattgttaacccattcattttcttagctaatccctttattgccggttggctgctggtggcagagtttatcttcactctggcgatggcgttaaagtgttaccccctgctgcccggcgggttactggccattgaagccgttatcatcggtatgaccagcgccgcccatgtacgtgaagaggttgccgccaacctggaagtcttgctgctgctgatgtttatggtggcaggcatctactttatgaagcagttattgctgtttatttttacccgtctgttactcagtatccgctcgaagatggttctgtcgctggccttttgcgtcgccgccgcattcttgtcggctttccttgacgcgcttaccgtcgttgcggtggtgatcagcgtcgccgtcggtttttacgggatttaccatcgtgtggcctcatcgcgcggcgaagagaacgatatgctggacgacagccatatcgatccgcattacaaaacggtgctggagcaattccgcggattcttgcgtagcctgatgatgcatgcaggcgtggggacggcgctgggcggcgtcatgaccatggtcggggagccgcaaaacctgatcatcgctaaagcggctggctggcatttcggcgacttctttttgcggatgtcgcctgtcaccgtcccggtactggtatgtggactgttaacctgtatgctggtcgagaaaatgcgctggtttggctatggcgaaacgttgcccgaaaaagtccgcgacgttttacagcaattcgacgatcaaagccgtaagaagcgcacccgccaggataaaattaaactcatagtccaggcgattattggcgtctggctggttaccgccctcgccctccatctcgcggaggtgggactgattggtctgtcggtcattattctggccaccgcgttaacgggtgtaaccgatgaacacgccatcggcaaagcgtttaccgagtcgctgccgtttactgcgctgttaaccgttttcttctccattgtggcggttattatcgatcaacatcttttcgcgccgattattcagttcgtcttgcaagcctctgaacacgcgcagctaacgctgttctatctctttaacggcctgttgtcttccatctcagataacgtctttgtcggcaccatttatatcaacgaagcgaaggcggcaatggaaaacggcgctatcagcttaaaacagtttgagcttttagccgtggccatcaataccggtactaacctgccatcggtagcgacgccaaatggtcaggcggcattcttattcctgctgacctccgcgctggcgccgttaatccgtctctcctatggccgtatggtctggatggcgttaccgtacactatcgtactgaccctgatagggctactgtgcgtcgaattcactcttgcgccggccaccgaatggatgactcaggcaggatggttagcaacgctttcgtaacgtttggccgggcaatacaccgcccggctccgatttttgcctgataattatccaattacacattatttcatttcccgctagtggcgcacgaattgaattggtttacactgcggtctctacgcatgttgcagggaaattattatgttgcgatttttaaaccagtgctcacggggtcggggcgcatggttactgatggcgtttaccgccctggcgctggaaatggtggcgctgtggttccagcacgtcatgttacttaaaccttgcgtgctatgtatttatgaacgttgcgccctgtttggcgtgatgggcgcgggtctggtcggcgcaatagcgccgaaaacgccgctgcgatacgtggcaatggttatctggatttacagcgcctggcggggtctacaactggcgtatgaacatacgatgattcagttgcatccctcgccgttcatgacctgtgactttatggcgcgctttccagactggttgccgttgggtaaatggctgccacaggtgtttgtggcatccggtgattgcgccgaacgccagtggtcgtttttaacgctggagatgccgcaatggctgttggggatctttgccgcttaccttgtggtggcgatagccgtcgtcatagcccaggcatttaagcctaaaaaacgcgacctgttcggtcgttgatacacacgctccttcgggagcgttttttttgcccgaagcgttgtttgccagtgattaaaaggtgtatattaaatacatcttttaatcaccacatcagggagatgtcttatgtcccacttacgcatcccggcaaactggaaagttaaacgctctaccccctttttcaccaaagagaatgttccggcggcactgctctctcatcacaacacagcggcaggcgttttcggacaactctgcgtgatggaaggcaccgtgacctactatggctttgcgaatgaaaccgcgacagaacccgaagtgaaagtggtgattaatgccgggcaattcgccaccagtccgccgcaatactggcatcgggtagagctgagcgatgatgcgcggttcaacattcatttttgggtagaggaagaccatcagggcgaggaaatgtatcaacagaaaaaagcctgacatcggtaaaccagtcaccactgggcggcgtcccgcccagtagccaggtgattaatggcgctaattaaacgctagagtagtttaattttaacgtggtatccctcaagccctttcatcgtttctcgcggcgcgaactctatttcggaaacctcttgcccggttttcttccgtagttcggcaacctttttgctaatgagtgccgcgatttcctcttctgctttatgtgtcaactcttcgctgttcattgatttcctcctttgaactcgcaaacggctaagcgcaataagacagtgtcgtcatggacgcgctactattttaacgtacaaaaaattataggctatctttctgaggattatcaggatgtttcgctttagaagatgtaaaaaaccgcctggcacagacggtgcatcaggcggttggttaatagcacaagacgctatctacgaggatcttcaacctcattctgggtatccgggtcgagaggatcgtctccctctggtgtatccggaatattttcaccaggaagcggctcatcctctggtaatggatcgactaaatcaggacgttcagacataaagcctccaacgaaccatagttattaaagataccctacagcactacttttggtttttctttggattttttccttcgtcttcgggtgtcttatcaggcttcctgggctgatcctttgaaacgcgcaacggttggttattcatggggtaactcctcaggataggcagcgatatactgctttgaaagtatagagtcgccgccatacgtgcgcgagcgcagcgacaaggcgcgtcagggaagaagagaaggcagtgataacgccaggtgacggaatttgcacgcaattcctggcttcaggggccgcccagcgtaaattaaagaattgtaaacaatcagccgttttgccgaagacttattctgcccacgacggtttatttaaaatatgatcctgccagtcccgtacttcagattctttaaccgcgatatgacggacagaaattcgctcgccatgcatagcagctttcgatccagtcagcagcggatgccacgtcggcaagggcttaccttccgccaacaaacggtaggcgcaggtcatcggcaaccattcaaagtctggcaagttttcgcgagtgagtttgatacagtcgggttcaaattcaaaacggcgctcataatgacggcactggcacgttttgatatttaattgcctgcacgccacgttggtgaagtagatttcatctgtatcttcatccatcagcttatgcaggcagcattgaccgcagccatcgcacagcgactcccactcggcatcggtcatttcatccagggttttacgttgccagaaaggtgtatcgctcattaaagtatccgccattgcactaaagctgcaccttataaccagtctggcctgcagatgcaagttttaccgccgctgaaggcggcaagcagattttacagaacgcgggtagacaacgtttcgccattaaaacgaatgtccagctcatcgccgcttaataatggccccacgcctgccggcgtgccggttagcaccacgtccccggctttgagcgtaaaatagcggctcatataggcgataaggggcacaataggatgaatcatatccgcggtcgacccttgctggcgaacctcgccattaacgttaagtccgataaccgtattttgcggatcgccgcagaaggccgcgacagggatgaagcctgaaatcggacatgcgttatcaaaacctttggctttttcccagggctgtccggcctttttcattttcccttgaatatcgcgcagggttaaatcaagcgccacgccataaccggctatcgctttacgtacatgatcttcggtcgcctggcggagcgttgcgccaatcagcacagcaagctcaacttcatgatgaacagcccccatatccgccggaatcgccagcggctggcgaatatcacacaatgcggtttccggcttgataaaaagcacgggttcttccggcgtcgcgctgcccatctccttgatgtgatttgcgtaattactgcccacgcagaccactttacttaccgggtaatcaagcaaggcgccttgccagttacgatgttgatacatattttcccctaagatcatgatggaattcaggcgcggcgccgaataccgtttaacggtcagcgggcgacgtattttgtcctaccgaagaaagatgttgtttcagcaaatcttccggcggcggcggcaattgtaaataatagccctgctcgcttaacgcctgttttactttttcgagctcggcattgactaattttttacgtccatcaagcggcagcatcatcgctaactgcggctgaccgaatcctttcatcaacgcttcaggcacccgcgaaaaatcgtcttttttttcgacatacaaataggtttgatcgcgcttgctacttctatagatcacacaaaacatacttttactctgaattaacgggatggtgacttgcctcaatataatactgactataacatgccttctggacttcggaatatcactccgtatcggagatgataaatagcaaattgagtaaggccaggatgtcaaacacgccaatcgagcttaaaggcagtagcttcaccttatcagtggttcatttgcatgaagcggaaccagaggttattcgtcaggcgttagaagacaaaatagcgcaggctcctgcgtttttaaaacacgcccctgtcgttattaacgttagcggtcttgaaagcccggtaaactggccggaactgcataagatcgtgacctcaaccggcttacgcattatcggcgtgagcggctgtaaagacgccagcctgaaagtagaaatcgatcggatgggtcttcctttactgactgaaggtaaagagaaagcggttcggcctgcgcccgttgagccggcaacgcccagcgaaccgccgcaaaacgctaatcccatcacaaaaacgcgattaattgatgttccggttcgttccggtcagcgcatttatgctccacaatgtgatctgattgttacaagtcacgtcagcgctggcgcagagcttatcgctgacggcaatatccatgtctatggcatgatgagaggtcgcgcgctggcaggagcgagcggcgatcgggaagcgcaaattttttgtacccatctgacggcagaactggtctctatcgcaggtgtttactggctgagtgataaaatcccggcagaattttatggcaaagcggcgcgcctgcgtttagcagacaacgctttgacagttcaaccgttgaattgatccctttttaacaaggaatttttatggcacgcattattgttgttacttcgggtaaagggggcgttggcaagaccacctccagcgcggccatcgctacaggtttggcccagaagggaaagaaaactgtcgtcattgattttgatatcggactgcgtaacctcgatctgattatggggtgcgaacgtcgtgtcgtttacgattttgtaaacgtcattcagggcgatgcgacactgaatcaggcgctgatcaaagataagcgtactgaaaatctcttcattcttccggcgtcgcagacccgggataaagacgcgctaacgcgcgaaggcgtcgctaaggtactggactcactgaaagcgatggactttgagttcatcgtttgcgactcgccggcgggtatcgaaaccggggcgctgatggcgctctattttgccgatgaagcgatcatcacgaccaacccggaagtctcttctgtccgtgactcggaccgtattctgggtattctggcatcgaaatctcgtcgcgcagaaaatggcgaagaaccgattaaagaacatctcctgttgacgcgctacaatccaggccgcgtcaataaaggcgacatgctcagcatggaagatgtactggagattctgcgtattaaactcgtcggtgtgatcccggaagatcaatccgtactgcgcgcatcgaaccagggcgaaccggtgattcttgacgccactgcggatgcgggtaaagcctatgcagataccgtagatcgtctgttgggagaagaacgtcctttccgcttcattgaagaagagaagaaaggtttcctcaaacgcctgttcggaggataaattatggcattactggatttttttctctcgcggaaaaagagtaccgctaatattgcaaaagagcggttgcaaatcattgtcgcggaacgtcgccgtagcgatgccgaaccgcattatttaccgcagttacgtaaagatattcttgaggtcatttgtaaatacgtacaaatcgatccggaaatggttaccgtccagcttgagcaaaaagatggtgatatctccatccttgaacttaacgtaacgctgccggaagccgaagagtcaaaataagctcttttatgggaaaattcctggattaaaaaaggcagaagaatctgccttttttatttttttacattattccgaatacggacatttatttcactggccgttttcccggcaattaccgtcgttaaagcggatactcctgcaacagaagagttaacttctcctccatcagttcggcgcgccagccggaaatcaattccggttgcccattttgcggttttaatttccagtgccagttaagcaactgattaatctgccgacgcgatgccagtagctcgccgctgacgtgatgcgacgcgctcacctccgccaccagcgctttgatggctttaaacgctttgcgatagcccggcatgtccatcagattcaacaggggttccggcaatgcctcttccggtagcgcctgtgctttcgccaccagcgatatcaacgtcttgccatgaaaacgaatctcgctgccggaaagccccaggctatccagctcaccgagactgcccggcatataacgcgcgaccgcccacagattttcttcacgcacaacaaagttcaccgccatatcgcgctcacgcgccttacgtagccgccagtcagctaaaagttgcagacaggctaactggcgagtacgcagttgccaggcattggtgatatcccgccatgcttcttccggcgcctgaatctcctgacggcgctgctgcatcaaccgacactcatcaagcgcggcaggcagccatcctgcggcttcagtttcaatcatcagctttttggcgatcggtaacagataccagacatccgccgccgcgtattcacactgacgttcgcttaaaggccgggctaaccagtcggtacgagactcgcttttgtccagcgccacgcccgtatactcttctaccatcgacgcaaaaccccacgacagcggacgcccgcaaaacgccgccagaatttgcgtatcaatcaggggttccggcagttcgccaaacgcattcagaaatacttccagatcttcgctacccgcgtgcagaaatttggtgattcccgtatcgcgcaacaccgcttttaacggcgaccagtcgctgatgccgagcggatcgatcagggcgacatttgccccgtcaaataactggatcaatcctaactgcgggtaataggtgcgggtacggacaaattccgtatctaaagcaatagccggacatgcgcggacagcctcacacaggctcgccagcgcatcgtccgtttcaatcatttggtaattcaaatcgtgttctctttggttcgcgccaaaataaatatcctccggcatagccggaggtttttcagatgcgcctataaggctctcttaccagccgcgccctaacaggcgcatacgatctgacatttgcatcaaacttcgttacttacggcccgtaaacgggctgcccggatacgggatcgataattgctcacccattttatcctcttcaagctggtgctttatgtagtcctgtatcttcgccgtgttcttacccaccgtatcgacatagtaccctctgcaccagaactccctgttcctgtatttgaattttagatccccaaactgctcgtaaagcatcagactacttttacccttcagatatcccatgaaactcgacacactcatcttcggcgggatctccagaagcatgtgaatatgatctgcacaacattctgcttccagaattcgtacgtttttccattcacacaattttcttaatatgctgcctactgccctacgcttctctccatagaacgcttgtcttcggtatttgggcgcgaaaactatgtgatatttacagttccatcgggtgtgcgctaagctcttttcgtcccccattgggacccccttttgatttcttgttgaacttttgcagttgccagaccgcaagatgttttaacaaatcaaaaggggttttaataactggcttaaagctgaaagctttccggaacccccagcctagctgggggttttccatagacaaaaaaacgccggcttaaccggcgtctctcgttagctgacttaacgctcaggctttattgtctactttgccacgggcttcgtcacgcagttctcgtcgtaaaattttcccaacgttagattttggtaattcctcgcgaaactcgacctgtttgggcaccttatatccggtcagatggcgacggcagaaggtgatcaacgcatcgtcagtcaatgccggatctttcttaaccacaaaaagcttcaccgcttcgccgctactaccggaaggcacgccaaccgccgcgacttcctgcacgccagaatgctgcatcaccacatcttcaatttcgtttggataaacgttgaaaccagaaaccagaatcatatctttcttacgatcgacaatccgcagaaagccgtcttcatccataaccgcaatatcgcccgtatgcagccagccatctttaatgatttcatccgtcgcgtcaggacgctgccagtatcccagcataacctgcgggcctttcacgcaaagctctccggcctcacccggcgcgacttcgttgtcatcgtcatccaccagtttggcttctgttgacggtactggcaggccgatactgccgctgtgataatcaatatcatgcgggttgacgctcaccagcggggcgcactcggtcagcccgtagccttccagcaggtattgcccggtcagctttacccaacgttccgcaacgacgttttgcaccggcatcccgccgccggctgacagatgcagcgaagaaaaatccagctgttgaaactctttattattgagcagggcgttgaataacgtattaacgccagtcatcgccgtaaatggatatttcgccagctccttgaccagaccggggatatcacgcggattggtaatcagcaggttttgcccacccagctcgataaaaagcagacagttcatggttaaggcaaaaatgtgatacagcggcagcgcggtcactaccagctctttccccgggtgcagcagcggcccataggtcgctttcacctgctccagattcgccagcatattgcggtgggtcaacatcgcgcctttcgccacgcccgtcgtaccgccggtatattgcaggaaagccagatcttcagcgacaacctcgggtttgacatactgcatacggtagccatgctgtagcgcgctgcgaaacgagatcgcatctggcaagtggtattttggcaccagacgcttgatgtatttcacgacaaagttaacaaccgtacctttggcggtagaaagctggtcgcccatccgcgtcagaataacgtgctgtaccgacgttttctcgactactttttccagcgtatgggcaaagttagaaacaataatgattgccgccgcgccgctatcgttaagctgatgctcaagttcgcgcggcgtgtacagcgggttaacgttcaccacaatcatgccagcgcgtaaaataccaaatagcgcgacaggatactgcaacaggtttggcatcatcagcgccacacggtcgccttttttgagtcccagcccttgttgtaaataagccgcaaatgcccgactacgttcttctaatttacggaaggtcattacctcccccatattgacgaacgcaggctgatcggcatagcgcgtcgccgcatgttcaaacagttcaaccagggattgataacggtcagggttgatctccgccggaacatcagcaggataacggttaagccaaaccttcttcaatgcatcacctctaaaatgagtgttcgtcgtcatcacaaccccagttaataaacaagtcgttaacattatattaactcagcgtaccagtttattaattacgcaactgaaaggttgcgaagcgcgtcactatttatttttattatgtctctatgaatgcagaaacagcggaccagccgctgtttcttttattgataaaacaaagagttactctgttactatcgtctgaacctccgcgggtccagggttataccatccccaaccgccatagccataaggccaggcgcgtccgccgtaaaaccacggatcgatcggctgtggaggcatgacgacctgctgaacaagatgccagcgtttatagccggtagcctgcatcagcataaatttatacggcgtattgccgattttaccgtcaaccgtgccggttatcgggccgacaacggtaactaactggccacggaagtccaccgggtccagaaaaccgttcacatcggcaaaaattctgccgcgcgaggcttcgcccagaacaggacgcgcgccgctatcaagcggtacggtcgcgatttcaagccgggtttttccctgctgattttgcaccgccacaactttgccgccaaaacgcgcctcttgcccgatatagagctgcggcgcattcatcacccgcaccaaatcctgctgcggcgtcggactcgaacctttaatggcatccgggatagtcacgcaaccgctcagcataagcgcaaaagcgcacgccagcgccccttttattaaccgtttttgaaccgccatgatgcgactcctttttctcgacctctattccaccccacagcataaagtatggggggtaatagtagtgagagtcattctttgccgggaagtttcttccacgccacttcgttacgcaaataaaccggctcggcatgttccacggcaacggtctctcctgccgccagcttttgactggcgatgggcaacatatcttccgctgccgggagcgacacctccccatcatgaagcgtcaggccgcattccttcgccagatcgggccacgcggaccaacccgttcctacggtcgcccactcgccggaaagctgtttcaaccgctcgccgacccgttccggtttcagcaccgcttccgtctcttcgccctgccagacgccctgcgcatcacgctggtattccgcccagtacacttcgcccatccgcgcatcaatcgcggcgagtacgcgggtcgcgccggttttacgccatgcaccctgcgccatcgtggcaagcgttgaaacaccgatcatcggcagatttgcccctaacgccagcccttgcgcaataccaatgccgatacgcacgccggtaaagctgcccggaccgcgcccaaacgccagcgcatctatctcattgagcgaggcgccgctggcggccagaatctcctgcaccatgggcaggatacgttgagtgtgttctcgtggacaaagctcaaagtgagcattgatagtaccgttgttccacagggcgacagaacaggcctctgtggcggtatcgatagccagaattcgcatgaggtttcgtgcttagatcaataaaatagcgcgcatcttaccatactccgtaacaaattactcggcggatggaatcgcaagaaagcgaacggcacgggcgatatcacgcgtgcgcggcgcaggaggcaggctggcgagaaacgtggcgccatagggccgcatcaccagccggttatcacaaatcactaacaccccgcgatcgtccgcatcgcgaatcagccgccccaccccctgcttcagcgtaatcaccgcgtcgggcagttgaacctcatcaaacggatcgccaccgcgcaaacgacagtcttccattcgcgcttttaacagcgggtcgtccggggaggtaaacggcaatttgtcgataatcaccaacgataacgtatcgccgcgcacgtccaccccttcccagaagctgctggtggcgacgagcagcgcgttgccggcgctaacaaattgctgtaacagttggcctttactggtttccccttgcaacaataccggcagcgtcatggtggcgcgaaactgctccgccaaatcgcgcatcatggcgtgtgaggtgcacagcataaaacatcgcccgttattggcttcgataatcggcctgagcatagccgccaactgtcgcgccgcgccgggctggttggtttgcggtaggttacgcggtacgcagagtaacgcctggcgcgtatagtcgaatgggctgggcagtagcatggattctgcctgttcaattccaagacgggcggtaaagtggtgaagatcatcatttaccgacaacgtggctgaggtaaaaatccagctaccgggcttctgttccatcacctctttgaatttgtccgccacggtgagcggcgtcagcgccagggtgaaatggcgcgaggtgcactcataccagtagctgtatcccggctgattgatctcttttaagcgtttcagccgtgaacggtatagcgtggcgcgttcaaaagccgcatccagcagcgccgaacggcccagcgacagcttcgccacgtcgtaacaaagctccagcgtatcatccagcagtaaaaatgcccgttggatacgtgagtcggctaacagttcacgcaaatttccccggtagccgggctcccccagttgcagacgaaaatcctgggcgctctgggcaaggcgatcggcgcatttttgcaactgttgagtgtctttcagttccgtccggtaggcgatggtgatgtcttttgctaaatccagcaactgacggctggagagcgattgtccgaaatactggctggcgatgtcaggcagttggtgggcttcatcgaagatcattacttcagcctgagggataagttcgccaaacccgctctctttaaccaccatatccgcaagaaataggtggtggtttacaatcaccacatccgcgtccatcgcctttttacgcgctttcaccacaaagcactctttgtagagcgggcaatcgctgccaaggcagttgtcgttggtactggtgaccaacggccaggcctgggaatcctccgccacgctgacgcaggtgctgatatcgccatcccgcgtctgatttgaccaggagcgcagcaatatcacgtcgcttaacgtttgtaccggtaaatcgccgcccgccagcgcttgttgttccagccgctccaggcagaggtagtttgaacgtcctttcaacagggccgtcttaccggtaaacgccaacgcttttgctaccgtcggcagatcgcggctgtagagttgatcctgcaacgctttcgacccggtcgaaataatgacttttttcccggcgcgcaacgccggagcgaggtaagcataggtcttcccggttccggtgccggcttcaacaaccagaggctgcgcattttcaatcgcttgtgttacggcaaccgccatttgtcgctgtggttcgcgcggtttaaagccggttatcgctttggccagttggccatctgctgcaaaatcgtccgtcacactgccccctgttaatttgcacagggattatgtcagggtagaaaggcttacgccagttacagaggtgacggcggcgccacattgtggcagtcttgaaccattcaaatgaaaagcaaatgaggaataagtaatgtctatcgtgcgtattgatgccgaagatcgttggtcagacgtggtgatctacaataatacgctgtggtataccggcgtgccggaaaacctggacgccgatgcttttgagcaaacggcgaatactctggcgcaaattgatgcggtgctggaaaaacagggctccagtaagtcacgtattctggatgccactatttttctgagcgataaagcggattttgccgccatgaataaggcgtgggatgcgtgggtcgtcgcaggccatgcgccggtacgctgtaccgtacaggccgggttgatgaacccgaaatataaagttgagattaagattgtcgcggcggtataagccggttattcgtcttcatcctcaaaacgcgccactatccgttcgccggtatggttggcgcgaagttcgcccgccacctgggcaatcgcttctccgctactcataccttgcgacatcaattcctggatacgttctacggctttttgctgttgttcatgactgagtgaaggtaaacctgcaaacatgattaactcctgctaaattgttagcgctaattatttcacgctacccggcggtaagccagtagtgttgtaacgagtcaggaatgatgaagacgttatctcccactgttatcaccttaccctggcgtccggacgccgctgaacactattttgcgcccgtaaaccatttgccctgggcgatgctgctgcattcaggtgatgctattcatccctataaccgttttgatattctggtcgccgatcctgtcaccacactgaccacgcgcgcgcaggaaaccacggtatgtactgcgcgcacgactaccgtcactctcgacgatccgttacacgttttgcagactcaactggaggcgctgccttttcatcctcagcctgaccctgacttaccctttcagggcggcgcgctgggtctgtttggttatgatttagggcggcgtttcgaaattttgcccgatactgccgcgcgcgatatcgctttacccgatatggcgattggcctttacgactgggcgctgattgtcgatcaccaaaaacaggtggtgtcgctgataagctatcacgatgcagacgcccgatatcgctggctcaccagccagcgcgcgccgacccgcacgcccttcaggcttacctcagcctggcaatccaatatgacgcgttgcgagtatggcgagaagtttcgtcaggtgcaggcctggctgcacagcggggactgctatcaggtcaatctttcccagcgttttcaggcgagctacgagggtgatgaatggcaggctttcgaacgccttaaccgcgccaatcgcgccccgttcagcgcctttcttcgtttacatgacggcgccatattgagcctttctcccgagcgttttatccaactggagaatggtcatatccagacgcgcccgatcaaaggtacgcttccacggcttaacgatccgcaggcggatcgtcagcaggcgcagaaactggctaattcaatgaaagatcgcgctgaaaatttgatgattgtcgatttgatgcgtaacgatattggccgggtcgccgtaccaggttcggtgaaagtgccggaactgttcgtcgtcgaaccatttcctgccgttcaccatctggttagcaccattaccgcccgtttaccggactcgcttcatgctaccgacctgctgcgcgcggctttccccggcggctccattaccggcgcgcctaaagtgcgggcaatggaaattatcgacgaactggagccgcagcgacgcaacgcctggtgcggtagcatcggttatctgagtttctgcggcaagatggataccagtattactatccgcaccgtcacggcaacgcagggccaactctattgctcagccggcggcggtatcgtggccgatagcaacgaagaagcggaatatcaggaaacttttgataaagttaatcgtatcctgcacccactggagaactaatacgtggataccagccgtctgacgctcgatcatttcttatcgcgctttcagcttttgcgcccgcagatgactcatgaaacgttaaatcaacgtcaggccgccgtactgatccctgtggttcgccgcccccagccggggctgctgttgacccagcgggctattcatttgcgcaaacacgccggacaggtcgcctttcccggcggggccgtggacagtaccgatgcttcgcttatcgccgcagcgcttcgcgaagcgcaggaggaagtcgccatcccgccgcaagccgtggaagtgattggcgttttaccgccggtagacagcgtgaccggttttcaggtcaccccggtggtcggcattattccgccaaatctcccctggcgcgccagtgaagacgaagtgtctgcggtgtttgaaatgccgctggcgcaagcgttgcaactggggcgatatcatccgcttgatgtttaccgtcgcggcaattcgcaccgcgtatggctctcctggtatgagcattatttcgtctggggcatgaccgcaaacattcttcgtgagctggcgctgcaaattggcgtaaagccctgactgtacacaacgccattcacgttgcctcaaggcggtaacaatcgcctcccccaaagaggcagcctgaagggcaacgtgtatatacttaactttacgcgcgtaagacacgacttgagattactgtcgcaatattagtaaaaacgcggttattcattagtttaattcatgtgaatagttaagctgatgccagcgttccctcttacactatgcgcagttataacatcgtaaccggaagccccggttgccctgtcaggagtattatcgtgattagcctattcgacatgtttaaggtagggattggtccctcctcttcccacactgttggcccgatgaaggccggtaaacagttcgtcgatgacctggtcgaaaaaggattactggataacgttacccgcgtcgctgtcgatgtctacggctcgctgtcgctgacggggaaaggtcaccataccgatatcgccattattatgggtctggcgggtaatgaacccgctaccgtggatattgatagtatccccggttttattcgcgacgtcgaaacgcgcgagcgtctgttactggcccagggacgtcacgaagtcgacttcccgaaagatgacggaatgcgttttcacaacggcaatttgccgctgcatgaaaacgggatgcagatccacgcctggcatgacgacacggtcatttatagcaagacgtactattccatcggcggcggctttatcgttgatgaagagcatttcggccaggaagcgacgaatgaggttactgtaccttatccgtttaaatcggcgaaagaaatgctggagtattgcaacagtaccggcctttcactctccggcatggtgatgcaaaacgaactggcgctgcatagcaagaaagagattgaagagtatttcggtcacgtctggcagaccatgcaggcctgtattgatcgtggtatgaataccgaaggcgtgctgccggggccgctgcgcgtaccgcgtcgcgcctctgcgctgcgtcgtatgctggtttccagcgataagctttccagcgatccgatgaacgtcattgactgggtgaacatgtttgctctggcggtgaacgaagagaacgccgcaggcggccgcgtcgtgacggcgccaaccaacggcgcgtgcggtatcgttcctgcggtactggcttactacgaccattttattgaatcagtcagcccggatatttacacccgctacttcctggcggcaggcgctattggcgcgctgtataagatgaacgcgtctatttccggcgcggaagtcggctgtcagggcgaagtcggggtcgcctgttcgatggcggcggcaggccttgctgaactgttgggcgccagcccggagcaggtttgcgttgccgctgaaatcggcatggagcataacctggggctgacctgcgacccggttgccggtcaggtgcaggtgccgtgtatcgagcgtaacgccattgcttcggttaaagcgatcaacgctgcgcgtatggccatgcatcgaaccagcgcgccgcgcgtctcgttggataaagtcatcgaaacgatgtacgagaccggaaaagacatgaacgcaaaataccgcgaaacgtcgcgcggcgggttggctattaaagtccagtgtgattaaacgccgtttcccctcccttcgcccatctgctacggatgggcgaaatttttatctcttcctcgtcgactccacgtttccccactacacttgctgtgtcgcggttggcttttgtcgccaacgcttattgggcggcccgcatgcaaacagcacaacggatcatcaatcattatcgccgtaatcgtttcattgtttgcacgatttgtgcactggtcacgctcattcttacgctgaacatccgatttatttcggagcggaacttaaatcaccatcgcacggttgcattcgcgaatcatgccgttgatgcgctggataatgtgctgcatcctctcctggtcggacgaaacatactgctccccttgcttgagcttccgtgcgcgaccgcgcatttgccgttgcgtaagcaagccgcccgcctacaaaccattcgttctatcgggctggtaaaagagggaattctctattgctcaagcatttttggcgcccgtaatactcccatacgccagcttcagcccgatcttcccgcagtcggcgatctgctgctactttccacagaccaatcgttactcaagggaagcccgatcctcattcagtggtatcccgcctctgccgatggccaggatggcgtgatggaaattgtgaatattgacttgctgacgactatgctacttgagccgcagcagccgcaaattaccagcgccagcctgacggtcggcaaacgacacctgttatatggtcggggcgtggtcgatactcttccggaattaaaaaaagatgaagagcgttaccagctttcatcgcgacatttcccttttactatcagcgtcagcgggccgtcggcaggcgtactggcgttcaaacatctcccgacgcagttaccgctggccgtattgcttagcctgttgatcggttatatcgcctggctggcaacggccagcagaatgagcttttcctgggaaattaatctggcccttgccgaacgggagtttgagctattttgtcagccgttgcttaatgcccgcacgcagcagtgtaccggcgttgagatcctgttacgctggaacaacccgcgccagggctggatctcaccggatgtttttattcctatcgccgaggaacataacctgatagcgccgctgacccgctatgtgattgcggaaaccattcggcagcggcactacttccccatcaaccatcagtttcatatcggcatcaatgtagcggcaagccatttccgacacggcgtgcttctcaaagatcttaatcagtactggtttagtgcggaacctgttcagcaactggtgctggagctcacggaacgcgacgcgttgcttgacgttgattaccgcctgatgcgcgagctgcatcgtaaaggcgtgaagttagccatcgatgattttggcacaggaaacagctcgctctcctggctggaaaaactgcggccggatattttgaaaatcgataaatccttcaccgccgccatcggtaccgatgcggtcaattcaacggtgaccgatattattatcgcgctggggcaaagactgaatattgaactggtggcggaaggggtcgaaaaccagacgcaggcacagcatttgcgccagcatggcgtgcaaatgttacagggctatctctatgcgaagccgatgcccattagcgaatttccacagtggctggcgggcagcgcgccgccgcccgcccggcataacggacagattatgtccgcgatgccgcatctatagacttgattcctgcgtgtgacgttattcctcttcgtcgtgggcaggctgttctttaacaattcgaaccagatcgacacgatagtcgttggcctcgacaatggtgatccgcaggggcggaacatcaatgacatcgcctacacgaggaatatggccattagcggcgatcactaaccccgcgaccgtcgcaatatcgccctcttcgttcaccagatggtcaacttccagcgcctgctgtagcgcatggagatcggtgccacccttcactatccagccctcggcatcggcaacgatttccggcgtttcatcggcatccgggaactcaccggcaatcgcttccagcacatccagcggcgtaaccagcccctgcaccacgccgaactcgttagtgacgataacgaaactgccgcgcgcgcggcgcaaaacgcctaacagattgataggatcaagcgtttccggcaccactatcgccggggaagacgcggcgatagccgcaacatccgcgccctcttccagcgccaccagcaactctttcgcgcgaacgataccgataatttcatccagctcgccccgacataccgggaacaggctatgcggagaagagagtaactgctgacggatttcagctacgctgagattcgcatccacccaactaatttcgcctcgcggcgtcataatgccgcgcagggagcgcgacgccagagtcagtacgccgttaatcatgtagcgttcttcttcggcgaaggcgccttccgacaccgatatcgcggccgggctatccgtttcatgttgcgtactcgcctggcgtttaccgcccatcagacgcaggatagcgtccgcagtacgcgcgcgcagcggcaacgtggactgatgacgaataaagttgcggcgcgcaatctggttaaacacctcgataacgatcgagaaaccaattgccgcgtacaggtagcctttcggaatatggaaaccaaacccttccgccaccaggctcaagccgatcatcagcaggaaactcagacagagcaccaccaccgtcggatgctggttgacaaaacgggtcagcggttttgacgccagtagcatcaccgccatcgcaatcaccaccgccgccatcataaccggcagatggtttaccatacctaccgccgtaatcacggcgtccagcgagaagaccgcatccaggatgacaatctgcgtgactaccacccagaagctcgcatagcctttaccgtgtccggtgtcatgctcgcggttttccagacgttcatgcagctcggtggtcgctttaaacagcaggaatataccgcccagcagcataattaaatcgcggccggagaaggtaaaatcccagacggtaaagagcggctttgttaaggtcaccagccacgaaataatggacagcagcgccagacgcataatcagcgccagcgagagcccgataagacgcgctttgtcacgctgctttggcggcaatttatcggcgaggatcgcgataaagaccaggttatcgatacccagaacaatttccaggacgacgagcgtgagtaaacccacccaaattgagggatccattaataattccatgacaagctcctgcttaaggaatgactaaacggcgcccacaacatctcaaaggatgcaggcggtaacgcaataaacaaagtaaggctatggcaagatatgccagattgacaggcgcaaaacggccaaagagtgaaatgacgtcggtgacgatccatacaacgggctgctgccctataccccattctaattaaacggaagctaaacataacagagacaactggtttttggcaaagatttaccttcctttgcaaagagatgtaaccaggatattttacacttcgaaatttctcattatcgaaaacaaaattacggatctccatcacacaaaatatttttttcgatatctaaaataattcacgaaaatcatgcgtttttcgttgtaaccctcatctgaatcgattcgcttgcggacggcgattcaaaaaatacatctgtcaagttgatgtgttgacaataataaaggaggtagcaagtgaccattgctattgttataggcacacatggttgggctgcagagcagttacttaaaacagccgaaatgctgttaggcgagcaggaaaacgtcggctggatcgatttcgttccaggcgaaaatgccgaaacgctgatcgaaaagtacaacgctcagttggctaaactcgataccagtaaaggcgtgctatttctcgttgatacatggggaggcagtccgtttaatgctgccagccgcattgtcgtcgataaagagcgctatgaagttattgccggcgtcaacatcccgatgctggtcgaaacgtttatggctcgtgacgacgatccgagctttgacgagctggtcgcactggcggtagaaaccggtcgtgaaggcgtaaaagcgctgaaagcgaaaccggtagaaaaagccgcgccagcgccagtcgccgccgcgccaaaagcggccgcaccggcaaaaccgatgggcccgaatgattatatggttatcgggcttgcccgtattgatgaccgcctcattcacggtcaggtcgctacccgctggaccaaagagaccaatgtcagccgtattattgttgtgagcgatgaagtggcggcggataccgttcgtaaaacgctgctgacgcaagttgcgccgccgggcgttacggcgcatgtggttgacgtcgcgaagatgattcgcgtctacaataacccgaaatacgccggcgaacgcgtgatgcttctgtttaccaatcctaccgacgtcgagcgcatcgttgagggcggcgtgaaagtcacttccgtgaacattggcggtatggcctatcgtcaaggtaaaacgcaggtgaacaacgccgtttccgtcgatgaaaaggatatcgaagcctttaaaaagctcaacgagcgcggcatcgagcttgaggtgcgtaaagtttccaccgatccgaaactgaaaatgatggatttaattgccaaagtggcgaaataaccgccggcatttaattagctttcacacttaagatagcaataggagaagtacaatggagattaccactcttcagattgtgctggtgttcatcgtcgcatgtatcgcgggtatggagtcggtacttgatgaatttcagttccaccgtccgctgatcgcctgtaccttaatcggcgccgttctgggggacatgaaaaccggtattatcatcggcggtactctggaaatgatcgctctgggctggatgaacatcggtgctgccgttgcgcctgatgccgcactggcgtccatcatctctaccgttctggtcatcgccgggcatcaaagcattggcgccggtatcgcgctggcgattccgctggcggcggcaggccaggtactgaccattatcgttcgtaccatcaccgtggcattccagcacgcggcggacaaggcggctgaaaacggcaacctgacggcgctctcctggctgcacgtttcttctctgttcctgcaggcaatgcgtatcgctatcccggcggttatcgttgccatctccgtaggcaccagcgaagtacagggaatgctgaatgcgattcctgaagtcgtcacaggcggtctgaacatcgccggcggcatgatcgtcgtggttggttatgcgatggttatcaatatgatgcgcgcaggctacctgatgccgttcttctacctcggtttcgtcaccgcggctttcacaaacttcaacctggtcgcactgggtgtcatcggcgcagtgatggctattctttacatccagctgagcccgaaatacaaccgtgtagcgggcgcgcctgcagcggctgctggcaataacgatctcgataacgaactggactaacaggtgagcgaaatggttgatatgactaaaactaccaccgagaaaaaactcactccgagcgatattcgcggcgtatttcttcgttctaacctgttccaggggtcatggaacttcgaacgtatgcaagcgctgggcttctgcttctctatggtgccggcgattcgtcgcctgtatccggagaataatgacgcgcgtaaacaggcgattaaacgtcacctggagttctttaacactcatccttacgttgcggcgccggtactgggcgtgaccctggcaatggaagaaaagcgtgcgaacggtgcagagattgacgatggcgctatcaacggtatcaaagtcggtctgatgggaccgctggcaggcgtcggcgaccctatcttctggggtaccgtccgtcccgtattcgcggcgctgggcgcaggtattgcaatgagcggcagcctgcttggtccgctgctgtttttcatcctgtttaacctggtgcgtctggcgacccgttattatggcgtggcttatggctaccgcaaaggcgtcgatatcgttaaagatatgggcggcggcttcctgcaaaaactgactgagggggcgtcaatcctcggcctgtttgtcatgggggcattggttaacaagtggacgcatgtgaatatcccgctggtggtttccaccatcaccggtcaggatggtcagacacgcgttaccaccgtgcaaaccattctcgaccagctgatgccgggtctggttccgctactgttgacctttgcctgtatgtggctgctgcgtaagaaagttaacccgctgtggattatcgtgggcttcttcgtcattggtatcgccggctactccgtaggactgctgggccagtaaggctgttgtacactaccggggccaaacggccccgttttttatttctctggaggataaatgactatcacggacctggtgctgattctctttattgccgcattattggcttacgctctctacgatcagttcatcatgccccgtcgcaatggccccactctgctttctatagccctgctccgccgcggtcgcgtagacagcgttatcttcgttgggctggtcgccatccttatttataacaacgtaaccagccacggagcgcagatgaccacatggttattaagcgcgctggcgttaatggggttttatatattctggatccgcacgccacggatcatctttaaacaacgtggctttttcttcgccaatgtctggatagaatataaccgtattaaagagatgaatttatcggaagacggcgtactggtgatgcaattagaacaacgacgcttgcttatccgtgtacgcaatatcgacgatctggaaaaaatatataaacttcttattgaaaatcaatagcttaagatatagcctcaactatgtttttcgaattttatttcgaatcataatatagctaaggctatattttctattgaccaattgttatttaatttaacgttttattgatgaataaatctaaatgaaaatcgttttcaattgaaagacaaataatattttatcgctgttgttttatattctaaaaatatgttaatgttgcgccgtcaattggggagtagccgatttccagactccggaaatgtacgtgtcaacatactcgttgcaaaacgtggcgcgtacggaccagccgccgctggtcaggcgagaccataggcgcatcaactgctgtgtatttcgtcacagaatggcgacatgcatgtttgctgggggcagtgatgtgtttaatggataccccggtcaggacgttgtcatgcactttactgctactgttcttctcgctttcggcatgtcgatggatgctttcgcggcatcaattggcaaaggcgccaccctacataaacccaaattctcagaagcgttgcgtaccggtcttatctttggcgcggttgaaacgctaaccccgttgatcggctgggggctggggatattggcgagtaaattcgttctggaatggaaccactggatagcctttgttctgctgatctttctgggcggacgcatgatcatcgaaggtatccgcggcggtagtgatgaagatgaaacaccgttacgtcgtcacagcttttggctattagtcacgacggctatcgcgaccagcctcgatgcgatggcggttggcgtcggtctggcgtttttgcaggtaaacatcatcgctaccgcattagctatcggttgcgccacgcttatcatgtccaccctagggatgatgatcggtcgctttatcggcccaatgctgggtaagcgtgctgaaattctcggcggggtcgtactgataggaattggcgtccagatcctctggacgcattttcacggttaacggttacgctgccagagatgaaggttgaaatccgtctggcagctaagtccggcgctggcagccagttgttcccacacgtctggcctggcgcgccaggcaaatggcgtcatttgcaacagtgctacagccgcttcggcggtgagctgcatgtgataagcaaggcgggtactctgctgcaatgtgaatccgtcgagctgctcggtatacggcgcatgtaaacgcacctcatcataaatgagcccttttagttccatcagatgatgcggccctggcgtggcggtaacgacccaaccaccaggtttcaccacacgcgccaattcctgcgccttacacggggcgtagattctgatcaccgcatccattgacgcatcggcaaagggcagtcgatggcttgacgccacacaaaacttcacctgcgaatagcgtttcgccgccgctttgatcgccgttttagcaacgtccagtccaaacgtggtgactcccggcaacgcctcggcaaaagcatgagtgtaatacccctcgccgcagccgatatccagaatcgccgtggccgactgatccagccgctcgcgcaacaggttaatcacggcatcgcgcagcggctgataatggcctgcatcaagaaacgctctcctcgcctgcatcatttcggcgctgtcgcccggatcgcgcgaacgtttatgctgtaccggcagcagattgatgtaaccctctttcgccacatcaaactgatggcgctgtggacatataacgctgttattaatctgcgtaagcggctgatggcaaagcggacaggtaaacgacatgacaactccggactggggcgctaaagggcgcaagtgtaacgcgaattgcgccccgggaaaatcctttacgaacccggaaccgcaacgtggctgccatgcatcaccagaaggtgatctgaatcggctggcataccgtctggctcaacattttccagccgcagcacatcgcccatgatctggctgaatacgggcgcagataccgcaccgccataataagccccattttgcggattattaatcaccaccaccagcgcaaatctggggttacttgccggcgcgacgcctgcggtatatgccacatacttatcgacgtatttaccatcatcgccaatttttttcgccgtcccggttttgaccgcaatacggtagtctcttactgcggcttttgttccgccgccgccaggcaacgcgacgctctccatcatatgttccacctcgtgcaccagttcttccggcattacccgcgtgccgatcacgggcggatcaactttggtgatcgataacggacggtagataccaaagctgccaatcgtggcataaacatgcgccagttgcagcggcgtcaccattaatccatagccaaaagcaaaggtagcgcgatctaaatcactccagtaacggcgtttcggtaataacccgctgctctctccggtgagacccagtccggtaggcacgccgaaaccaaagcttttataagtatccattaatttctgcaccggcatcgccagagaaaggtgagaaacgccggtatcgctggatttttgcaaaatgccggttaatgtcagttccggatagtaaccgacgtcgcggatacggtgtccatcgagagtaaaaggatgggtatcgataacgctgtccggctgcacgatgccctgctgtaacgcagtcataatgaccaatggcttcacagtagaaccgggttcgaaggtgtcgctaatcgcgcggttacgaaaatcgtccaactgcgcgccttcacggttgttcgggttgaaatccgggtagctcgccatcgagagaatttcacccgttgggatgttaatcaatacggcagcgccggattccgctttgttccagatgacggcgttatccagcgcatcttcggtaaccgtttgcagacgttcatcaatgctaagctgaagttcatgagcaggaaccggattcacttccgtaatgttctcaataacgtgaccaaatttatctttacgcaccaatcgggagcccggttttcccgtcagttgcgcgttaaagctcttttcaataccttctattccctgcccgtcgatattggtaaagccgatcaaattggccgctacgtgtccggcagggtaaaaacggcgcgactcttcccgcaggttaatacccggtagattcagtttatctatccattcggcttgctggggtgaaacctggcgcgcaaggtagataaaacggcctgccgggttactgtttacccgttccgcaagcgtactgagagacagatgcagggcgctggccagcgcctgccagcgctcattgtagccaacgccgcctttgcttatgatagtcttcggatcggcccagacagcattaaccggaacgctcaccgctaagggtcgcccttctctgtcggtgatcatgccgcgtggagaggccgtggtcacttcacgaagcgagcgcatatcttcttgtttcaccagtttcgacggcgtaacaatttgcagccatgccacccgccctaacaacaatgccatactgagcagaatggcagtgcaaagtagtgcaaaacgtatgggcgtaaaattacgggtatcgccgtcgcttttctttttcacctgatctccagccgaatcatttttcaggtgattgatttaacgggaaacggccggaaaaaccagaaaaaacaatgctaataacatcgcgcctttgcaacaaatcgctaacgagagcgcatccagacacattttgaaggatattgaattaaaaagccccgcttttagcgaggctttatatctgaggctgacgcgacaaacgcatcaaatcagtggtgtcgatcagatagctgttacgttaacagcagccggacctttctggccgtcctgaatttcgaactcaacgttctggccttcagccagagttttgaaaccattgccctggatagcggagaagtgtacgaacacatctttgctgccgtcagccggagtaatgaagccaaaacctttggattcgttgaaccacttaacttgacctttaatctttgccatttgcaaaattccttagagtgttttctttgcccgtaggcataacatagataaaactgagacattactgcttgaggcactaatataaggttcggcagagaagcggtattcaacgtcaacgtgtttactcaggacttctttactgaaaatgccacacataaacagaactgtacctcgtttaacccaaagcctgttatcacatacaacgttaattatggcaagccatttttaaacgtgtctcgatccgtcgcacaaattacgagaaccttcacaaattgacagcacgtttatgcaacaaaattgcgaaagatatatcctcacgcgctgacggactcctgacaacgtcactgctgaaaagccatttttctaccatagctcaataacttcgcttcttccagtgcatcaaatcacatttaaaagctgtatttttcatatcactttttatgctgagttatgcataaattgtcacaatgataaaaaacaccttttaatcaaaataatagaaaagaaaagcgattttcggcaccgctttttgtgatgttctgcgtctttacagaatgccttaaaataatgaacaaacaatgacaatccataaagagagagaaacgtttcgcttttaatagagaatgagcggtatcacaaaaatgccatatgtccatttgttatacatataaaactatgttgcatataaagccatatattatgtaaggtgttgatgctgtagtatcagttgcaaacggcaacgcggagagatccgacggggaaatggggcgtatggcactggcgccatttgcgccccggtaagcattatcgttctgcaaccagacgaatgatgtcctcatcctcttttggttcgcttgccgctgttgcgggttccgcttctttttctggttcgtttgcttcgcaaaggcgacgtaacaacgcgttttgccgcttctgttgatccaataacgcttcgagcaattctatctgctcgttggcacgggagcttgcccggttgacaaagaaccagagcgccagccccaccaccagaaccaccattgatactattaaagatgcaagagaaaacgcaccagagtttaaaacgtcgttcatttcaccacctcaatgtagagacgtcattctaccactgctacacgggaaggaaatctctggtgtaaaacgtttaccagggaataaatttattgatggcgcaaataccgctgaaaaattgtacatcctgatcgcacatgatattaaacacctgcgcccacagcaacaggcatactaccaccacgatgccgagaacgacccatcgaaattttttcactccactctccgatcttacatcttatgtcgctaaattatcatgagttacttaaaccaggagtaactgtagcggcattatatgtttttaggaatgattcacttgtttcaatcaatgtacacgctactcttattctaactaaaaaagaaaagaggtagtaatgcgtttgatcattcgcgcaattgtattgtttgccctggtgtggataggcctgctgatgagcggctatggcatcctggtgggaagtaaagtgaacgctgcggggctgggtttacagtgccattacctgaccgcacgcggcaccagcacggcgcaatatctccataccaacagcggcattattggcttttccgactgtcccattttcagaaaaatcgccaccgtggtggataatggctaagcggcaataaataatttcacagtgaaactatcaccaataattcccctatattggctgttgttcataagtactgttaaataatattttaataaccgttaaataagccgacagatattatctacttttacgatttcatcccacccgatgttataaaaaaaagcagctacatttttcgtagctgcttttttttaacgtcatgctaataacgttgcttagaagggataatcgttgtaacccatttgttcagaaattttacgcgcggcggcgtgtaacatagccacatattcctgtaggcgttcttctgaaaaacgcagcgtcgggaacgaaatgcttaaccctgcgatgactacgccaaaacggtcaaataccggtacgccgatacaacgtaatccttcttcctgttcttcgttatcttcaccgtatccttgcgcacgcacttcatccaacagcggcagcaacgcttcagtgctggtaatcgtgcgtcccgtgctttgcttatactctacgccgtcgagaatctgcttaacctcatcacggtcgcgccaggccagaagcactttaccgatggccgtactgtacagcggattacgacgcccaatacgtgagtacatccgcagattgtacatagagtcaattttatggatatagacaatgctgtcttcatccagcgcgccaagatggatagtttcttttgtcagacgagacagttcgcgcatctgaatgtccgcactgcggatgagatcaacattttgcaaagctcgcgcgcccagctcaaacagctttagcgtcagagagtatttttcagactccccctcctgagccacgtagcccagcgttttcatggtttgcaaaaagcgataaacggtgcttttcgacatcatgacgcgctgcgatagctcggtaatccctatttcacgctcttcacccagcgcctgcagaatgccgaaaactttcagcacagaagatacagaatcaggctgcttatccagatctgcgtttgccatttatcacctcattacgagcgttttataaaattcagaacgagtttttattataatttcacgccaggtcgcccgcaatccatctttgcttacttcgttacaaatctgcgacataacaactcagtattaatgctaacattattattcagctcataattccccttattacaaaatacttatggaaaaaacacgggccgatggcctgcccctcccgcagagatacggcgctatcctgacgattattatcggtatttcgatggcggttctggatggcgcaatcgctaatgtcgcgctgccaaccattgcgactgatttacatgcctcccctgccagctctatctggattgtcaatgcgtaccaaatcgccattgtcgtctcactgctttccctgtcttttttaggcgacatgtttggttatcaccggatctataaatgtggtttagtggtatttctgctttcatcattgttttgcgcgctttcagactcgctgcagatgctgacgctggcgcgcatcgcgcagggatttggcggcgcggcgctaatgagcgtaaacacggcgctgattcgtcttatctacccccagcgtcatctgggacgaggcatgggaattaactcttttatcgtcgccgtctcttccgccgcgggtccgacgatcgccgcggcgattttatccatctcatcatggaaatggctgtttctgattaatgtcccgttaggtatcatcgcgttaattctggccatccgctttttaccagcaaacatcgcccatgacactaagccgcgctttgacttaccgagcgcggtaatgaatgcgctcacatttggcctgctgattaccgcattgagcggatttgcccagggacagtcgctaacgttgattggcgcagagctgctcgttctggtcgtggtcgggtttttcttcgtgcgccgccagctttctttgcccgtccctttgttacccatcgacttgttacgcattccgcttttttcactctcgatcggcacgtcaatttgctcgttctgcgcgcaaatgttagccatggtctcgctacctttttatctgcaaaccgtgctgggccgtagcgaagtagaaaccggcctgttattgacgccctggccgctggcaacgatggtgatggcgccgctggcgggatacctgatagaacgtcttcatgccggtttgctgggggcgctgggaatggtgataatggcagccgggttgtttgcgctggtcatgttgcctgcctccccctccgatctgaatattatctggccaatgatcctttgtggcgcagggtttggcctgttccagtcgccgaataatcacaccattatcacttccgcgccgcgtgagcgcagcggtggcgccagcgggatgctgggcacggcgcgactgttaggccaaagtactggcgccgcgctggtagcgctgatgttgaaccagtttggcgatagcggtacgcatctttcgctgctcgcagcggcgatcctggcgactctcgcggcggtagtgagcggtttacgtattacgcaaccacgcgttcaggcgtaaaaaaagcgcgtcattcgacgcgcttttcatacttgccagtgggcttattatttcaggtactcgccgctacgcagcgcttcaatgcgtttatccagcggtgggtgcgtcataaacagctcgcttaacgatttcgatttaccgttaatacaaaacgccatcatgctggtcgcttcttgcggctcgtagctggttttcaggcgctgcaacgcggcaatcattttttcacgaccaaccagcttcgccgatcccgcatcggcatgaaactcacggtaacgggagaaccacatggtgataatgcttgccagaataccgaagaccagttccagcaccgtcgcaacggcgaaatagattagcggattaccgttacttccttcgccttcatcacggttgccgcccagaaaacctgcagcaatttgcgcgataatgcgcgaaataaagataacgaaggtgttaaccaccccctgaatcaacgtcatcgtcaccatatcgccattggcaatatggctgatttcatgcgcaatgacggcttccgcctcgtcagggctcatattttgcaacagaccggtgctcacagcgaccaatgaggcgtcacggcgggcgcccgtcgcaaacgcgttaatgtccggcgcatggtagatagcaacctgcggcatggcgataccggcctggcgcgcttgcgttgctacggtgttcatcaaccagcgttctctttcattgcgaggctgttcaataacttcccctcctacggattttaacgccatccatttggacatcagcaatgaaataaaagaaccgccaaaaccaaacagcagcgccatgatcagcaagccttgcacgctgctcgactgtatccccgtcaggctcagaaccagcccgaaaacgaccatcacggccaggttcgtcagcaggaagagcgcgattcgcatcataattttcttttaacctcaatttaacaaagcgcactatgcgattacccacatcgtatgggtcttatggctattttcaagcatcaccaggcggtaagtcacgagaaaaacacaactttacattttgtagcattatcctgacgacttctgcgcttgttaaaaaaaaacaggcacaattttttgtgcctgtttagcgttacttattggctgccgcctgctccgctggtttttctttttcaagatgcgccaggtccagagcaatcttcaccgtttcatcaaggtatgggtccggctcctggtaatcctttggcagatcgtccagtttcttcagcaacggtttaccctcgcgtttaaaccgatcgttaatacgcgccagacgcagagcgtcttcttcattgttctctttctcacgctgcgcataattcagagagacgatgttgcgcttatccttcatggcattgaaacgtgcgatatccttcatgatgtactggaactcaggatctttggcgatacgcgcgttgtgttctttcaataattccgggccaaacggggccaaatcgtccgatttcacgtatttcgccgcatcaatgctatcccacggcaaggcgttatcttcaaatttttctccggtttccgtctcttcattgccagtcggcatgatgatatccggcgtgacccctttacgctgcgtactaccgccgttgacacggtaaaacttctgaatggtgtactgcaccgaacccagcgcaggccattccgggcgaagcatctgatcgtaaattcggtttagcgaacgatattgctgtaccgtacctttaccgaaggtcggctcaccgacaatcagcgcgcggccataatcctgcatcgcggcagcgaagatttccgatgccgaggcactgaaacgatcgaccagcaccaccagcgggcctttgtagtagaccacgccgtcggtgtcgctatcctcacgcactttaccgttattgtcgcgcacctgaactatcggaccagaagggataaacagaccggaaagcgaaacggcttccgtcagcgccccaccgccgtttgaacgcagatcgataacgatgctgttaacgttctgtttttccagcttctgaagctgaactttgacatcatcggtcaagccaacatagaagcctggaatatccagtacaccaactttttccttgccgacggttttcaccgacattttaaccgcgcgatcttcaagacgaatccgttcacgcgtcagcgtgataatacgcgttttcgtccctttgccagccggcagtatttccagtcgaaccttgctgcctttcggccctttgatcagcgccaccacatcgtcaagacgccagccaataacgtcgaccatcggttttccggcctgccctacgccgacgatacgatcgccgacgctaatcgacttgctcttcgctgccgggccgccggcaaccaatgagttaatgacagtataatcgtcatccatttgcagcaccgcgccgataccttccagagacaggctcatttcggtattaaactgctcggtattgcggggagaaagataattcgtatgcgggtcgatttcacgcgcaaaagcggtcatcgccagcgagaacacatcttcactgttggtctgcgccaggcgacgaatagcgaatttgtagcgacgcgtcagcgtttcgcgaatttctttgtcgctcttgccggtgagtttcaggctgagctcatcgaatttcactttaccatcccacagcgcatttagctcagcctcatctttcggccagggcgctttactgcggtccaggttaaacgtatcgtttccggtgaaatccattggccgttccagcacttttagcgcgtactggtaacgttcaaaccggcgcttttgcgccaggttataaagatcgtaaaaaacatccagcttacccgtgcgcagctcatcgcccaacacggttttctttttcgcaaactgctcgacatcgctcgccaacaaaacgttgtggctatagtcgagaagattcagatagcgatcaaaaatctttgccgaaaatgcctcatccagatcgaactggcgataatgggagcgggtaaaacgcgacgttacgcgctcgctcaccgtcgcatgttgcgtctcttcctttagtacgggaatttgatcggcacgcgtaatatcttccacggcgaaggactggcctgctaatgcaagcaggccagctaacgcggtaagcctaaaaaaagtgttcatgccaggcctggcctccgtttcagaacaccaggtgttctgcgcgtacaatcaaagacatacccgaattcagctgtacacggacaccatctttggtgatttctaatacggtggcatccatcgcattattacccgctttcaccttgagggactgccctacggtcaatactgaaatatcagaaaccggcgtgtgcttctcttcgcgaggcgcacgcggcgctttcgtcgtcggtttatcagcgcgaggtttacgttcagcgccttctttacgacgcgctaccgggcgaggtttacgctcgcgtcgcggcgcgtcttctttttcgccagccgccgcggcagcttcgcgttttttcgcttgctgctctgcgcgctgcgcctgaacacgggctttggcttcttcaagctgcttacgcgcatgttcgacatgctgttcttccagctcgccgcacggattgccatcaaggtcgacgcgcgttgcgcccggcttaacgccgtacaggtaacgccagcttgaagtataaagacgtaaagcggaacgaagttgcgttttgctgaggttcatttcgcccccaactcgctctaccagatcctgaaaaataccaattttcagcgggcgagcttcgccttccgcactaaaacagtgaggaaaacgctcggccagaaacgcgataacttctttactgctattcaacttaggttgattttccatgaaatttcctgattacaacggacgtagccaacaagcagcaggcatgaacaggcgtcattataatgacgccatcagtaattgctacgttatccgttgattatcctgcgacgctcgcaaagaattttttgtaatccgtcgttgcaagcacggtttcaagctgtgcgaccagcgtacgcaggccgtgttcatcttcttcggtaaaacggccaaacgccgtgctatctatatccagcacgccgataatccgttcgccaaccgtgacaggcagcacaatttcggcgttgctggcggcatcacaggcaatatggccgtcaaacgcatgaacatcatcaatacgttgaaccttattctgcgctaccgctgcgccacacacgccgcgaccaaccggaatccgcacacaggcgattcgcccctgaaacggccccaacaccagcgtatcgccttcgaggagataaaatcccgcccagttcacctcggtaaggcgttcgaacagtagcgcgctggtattcgccagcgtggccagaaagctggtttcacctgccattaacgactgaaaatcgcggtttaacgccgcgtatagttctgttttgctcattatataatcacttcgtggtcttactcctaaacacaggctattaaaataagcattaaatgcgttcttgctcaagattattcctgtcatgagttaagattacattattctaacactttgattcacgatacatggctctgaacacctcacacgtcacgccaacaaaaaagctaacgatcaggtcaattagcgaagcgctgccgcgcagccactaccagcgctgccctgaatgcgacatgctgttcagcttgccggagatgagcgctcatcaaagcgcttattgtcctcgttgccaggccaaaattcgcgatgggcgcgactggtcgctgacgcggctgaccgcgatggcggtaaccatgctgctattgatgccgtttgcctggagcgaaccgttactccatatctacctgttgggcgtacgcattgatgccaatgtgatgcacggcatctggcaaatgacgcagcagggcgatccgttaaccgccgcaatggtgctcttttgcgtggtgggcgcgccgcttattctggttttttcaattgcttacctgtggtttggcagccttctcggcatgaatctgcgtccagtcctgctgatgctggaaaaactgaaagagtgggtgatgctggacatctatctggtcggtattggcgttgcctctatcaaagtgcaggactatgcctttctgcagccgggcatcgggcttttagcgttcgtctcgttggtggttcttagcattctgactatgattcatctgaatgtggagcaactatgggaacgattttatccgcagcgccctgctcaacgtgcggacgaaagattgcgcgtctgtcttggctgccactttagcggctatccggatgcgaaaggacgctgcccgcgttgtcatattccgctacggttacgcagaaaacagagcatacagaaatgttgggcggccttgctggcgtctattgtctttttgctgccggcaaacctgctgcctatctcggtaatctacattaatggcgggcgtcaggaagatactatcctgtcgggcattatgtcgcttgccagcagcaatatcgccgtcgccgccgtcgtttttatcgccagtattttggtgccgtttaccaaagtcatcgtgatgtttacgctactgttgagtatccattttaaatgccaacagggactgcggacgcgaattctgttgctgcgtctggtgacatggataggccgctggtcgatgcttgatcttttcgttatctcgttaaccatgtctctgattaatcgcgatcagattctggcttttactatgggaccggctgcgttttatttcggcgcagcggtaattttgactattcttgcagtggaatggctggatagccgcttactttgggatgcacatgagtcaggaaacgcccgcttcgaagactgaagcgcaaattaaaaccaaacgccgtatttcacctttctggctgctaccgcttatcgcgctaatgatcgcggggtggctggtatgggatagctaccaggatcgcggcaatagcgtgactatcgattttatgtcggcggacggtatcgtaccgggccgtactcccgtgcgttatcagggagtagaagtcggcaccgtggaagatgtcagtctgagcaaagatctgcgcaaaattgaagttcgcgtcagtatcaaatcagatatggaagatgcgttgcgcgaagagacgcaattctggctggtgacgcccaaagcctcgctggcgggcgtttccggcctggatgcgttggtcggcgggaattacatcggtatgatgccaggtaaaggcaagcccagagatcatttcgtcgccctggatacacagcctaaataccggcttagcaacggcgatctgatgattcatctccatgcgccggatctcggttcgcttaatagcggttcactggtctatttccgtaaaatccctgtcggacgggtgtatgactattcgattaaccctaacaaacagggcgtgacgattgacgttctgattgagcgacggtttaccgatctggtgaaaaaaggcagccgtttttggaatgtctccggcattgacgccgatctaagcctgagcggcgcgaaggtgaaactggagagcctcgcggccctggtcaatggcgcgattgcgtttgactcaccggacaattccaaacccgccgcccaggatgacacgttcggcttatataaagatttagcccacagccaacgaggggtaatcgttaaacttgagctgcccagcggagacggtctgaaagcggaatctacgccgctaatgtaccagggactggaggtgggtgagctttctaaactgacgctcaaccctggcggtaaagtcaccggagagatgaccgtcgatcccagcgttgttccgctgatgcgggaaaatacgcgtattgagttacgcaatcccaaactgtcgctaagtgacgcgaatatcagttcgttgttaaccggaaaaaccttcgagctggtgccgggcgacggcgaaccgcgcagtgaatttgtggtggtgccgggtgaaaaagccctgctgcatgaggcgaatgccttaaccctgacgctgacggccccggaaagttacggcatcgaaccgggccagccgttaattttacatggcgtaaaaattggccaggtcattgagcgcaacttatccagtaaaggcgtgtcattcatcgtcgcgattgaaccgcagcaccgggatttggtacagggcgacagtaaattcgtggttaacagccgggtggatgtcaaagttggccttgacggcgtagagttcctcggcgccagcgccagcgagtggattgacggcggaattcgtattttacccggtacgagcgggaagatgaaatccacctacccgctctatgctaacctggaaaaagcgctggaaaatagcctcagtgacttaccgactaccaccttaacgctgacggccgaaacgttgccggatgtccaggcaggttccgtcgtgctgtatcgaaaatttgaagtaggcgaagtcatcaccgttcgcccacgcgccaatacctttgacatcgacctgcatattaagccggagtatcgccacctgttaaccagcaatagcgtgttctgggcggaaggcggcgcgaaagtgcaacttaacggcagcggcctaacggtacaggcctcgccactctcccgcgcgctgaaaggggccattagttttgataacctgagcggcgccagcgccagccggcgcaaaggcgataaacgcattctttatgcttcagaaacctccgcccgcgcggtaggcggacaaattacgctgcacgcgttcgacgccggaaaattggcggaagggatgcccattcgttacctcggtattgatatcggccagatccagacgctggaattgatcaccgcacgtaatgaagtgcaggcaaaagccgtactttatccggagtatgtacagacatttgcccgcgccgggacacgtttttccgttatcacgccacaaatttccgcggcgggcgtcgagcatctggatacgattctccagccctatattaacgttgagccaggacgcggcgcggcacggcgcgactttgaactgcaggaagccacgattaccgactcacgctatctggatgggttaagcatcgtcgtggaggcgccagaagcaggctcgcttaatattggtacacccgtcctgttccgcggtatcgaagtgggaaccgtcaccggaatgtccctggggtcgctctccgatcgggtgatgatcaccttgcgtatcagtaagcgttaccaatatctggtgcggaataactccgtattctggcttgcctccggctatagtctcgactttggtctgacaggcggcgtggtgaaaacggggacatttaatcagttcatccgtggcggtatcgccttcgctactccaccaggtacgccgctggcgccaaaagcgcaagccggtaagcatttcctgttacaagagagcgaaccgaaagagtggcgtgaatggggcaccgctctgccacgttaaacaccaggctccggcgtactcgcgccggagcgttttatgctacactgcgcgcctgtttttttgccggcgatacacctgtggctcaacacgctgtctattttcctgacgcttttctgacgcaaatgcgtgaagcaatgccttccacgctctcttttgatgaatttatttcggcctgccaacgcccgttgcgccgcagtatacgcatcaatacgcttaaaatatccgtggctgatttccttgccctaatcgcgccctacggctggtcgctcacgccaattccgtggtgtcatgaaggattctggatcgagcgcgatgatgaagaggcattgccgcttggcagtaccgctgagcatttaagcggcctgttttacattcaggaggccagttcgatgctgccggtcgcggccctgttcgccgatgataatcatccgcagcgggtcatggatatggcagcggcgcctggctccaaaaccacgcagatcgctgcccgcatggggaaccgcggcgccattctggccaacgaattttcggccagccgcgtcaaagttctgcacgctaatatcagccgatgtggaatcgccaataccgcactgacgcatttcgatggccgcgtatttggcgctgcgttaccggagatgtttgacgctatcctgctggatgcgccctgctctggcgaaggcgtagtacgtaaagatcctgatgcgctaaaaaactggtcgccagaaagcaatctggatatcgcggcgacacagcgggaactgctcgacagcgcttttcatgctttacgacccggcggcacgctggtctactccacctgcacgttaaatcgccaggaaaacgaagcggtctgcctctggctgaaagagacctacgccgacgccgttgaatttttgccgctgggtgatctgtttcctgacgctgaccgcgccctcaccccggaaggcttcctgcacgtcttcccgcaaatttacgactgcgaaggattcttcgtcgcacgtctgcgtaaaatgtcatcccttccagccatgcccgcgccggggtataaagtgggggcgtttccttttacccccctcaaaggccgcgaagcattacacgttacccaggcggccaacgccgtcggactgttatgggatgaaaatctccatctttggcagcgtgaaaaagaggtctggctgttcccggcagagattgaatcactgatcggaaaagtccgtttttcccggctcggcattaagctggccgaaagtcataataaaggctatcgctggcaacatgaggcgacgatagcccttgcctgcccgactcatgctcacgcgttcgaactttctgtgcaagaggcggaggagtggtatcgcggtcgggatatttatccgcaaacaccccctgccgctgatgatgtcctggtgacgttccagcatcagccacttggtctggcaaaacgtatcggcgccagaataaagaacagttacccgcgtgaactggtacgtgatggcaaactctttactggtaatagttaaaaggcgcacaaaaaaaccgcactttttgactggcgcttttgcctacgttgactacgctgaaaaatggacggctaaactggtcgtaccacaattagcgtattaacggagagcacgatgatgaaaaccagtgtgcgcattggcgcttttgaaatcgacgatgccgaattacatggcgaatcgccgggggagcgaacgttaacaatcccctgtaaatccgatccggatttatgtatgcaactggacgcctgggatgccgaaaccagcgttcccgccattctcaacggggaacattccgttttgttccgtactcattacgatcctaaatctgatgcctgggtcatgcgtcttgcctgactcaaaaagaacccgtcgccaggcgggttatttattcttccttttctcatttcccccctgcgctaacctctcctacactatcgtgtaaagtagttaacattgaggatgtaatgttcgcgctggtactttttgtatgttacctggatggaggatgcgaggatattgtcgtggacatctacgataccgagcagcattgtctttattcgatggacgatcaacggattcgccatggcggctgttttccggtagaggattttatcgacggcttctggcgacctgcgcagcaatatagcgatttttaaccctggtcgctgataccgctattgtatccgcgctaacgtcaattgcccgccaaataccgcgcccgtatcaatatagtgtacgttggcaaaatccatgcgccgacgcaacggcgtatggccaaaccaaaaatgatcggctccgctaatcccgccgcgcttatttatgagccgttcgcggctccagagaacctgatgtaagtcgacctttttttgccattgataggttgacgcgggataatctgcatgagcgatcacatgcgtgctatggcggcaacgaacttccagtatccagggcagccgctgacaaagaataaaaagcgcttcagcttgcgcagcgtgttcagccgtcaggcgggtaaaccagtcgccaccattcatcaaccacagcgtcgactgcgatgaggcccgcgcatccagcgccatttgttcatgattgccgcgaaccgccgtcatccaggactcacgcagtaaagccaggcagcccaggctgtccgggcctctatcaatgagatcgcccacagaaactaacaagtcttgttgcggatcaaatcgacactcacgtaaccttttcattaacattgaaaaacagccgtgaatatcgccaaccacccagacatgccgccaattctttgcctctattcgctgataaatctcttcaggccgcatcatgtttttcctgtcgttcattatccaggacagatataaaaagatagcgtgtgcagatttttttgcttagtaagcgtgcgctgttgtaaatagcgaatttcaccattagcgagtaaatgctttgttatcatcgcaataaaatataactggctgcgccaggggagggttatcccctggcgcagcgagctactcactatcgcctgttcaccttcaatactcttcctccttaaaaacatatcggaaacataaaccacatcgcctcagcacacgatatagcacactctttagcggagtgatcctcaaggcaaaccagcgccaatgcaggtgtcgttaccgtggcgaccatcgcccccacaaacaggcgcagcacaattttttttaaaggcggcataacctctcctgacagttaacagaccattaatccttatcgagacatcatccgtgcgcgggtatcatagacttaacaacacgcagcgttacaaaaaaagctgtctggttgtgcaggtatttagagtaataacaattattttaagttttaaggttatccatttgatttttatattaaaataaagatgacgacgttttgttaaaagcgtcgccataaaaacgaatatatagtttcagaaaatctgctattaattcatatggttaatagcagtattgtatttactaccatcaggaggcattctgaagatacttattcgcaatattttctatagttaactgaaattgttgtggcgttggcatcgtccccttattaaacagcggcgtaacctctttcataacgattttctcagcatacgctttaaaagatacctgctgattatgatttataaacatatgcggatatttaatactcgcggaagcaatgagggggacgacaaaaggattcgcccctgccccacctggagtaaatacgccattttttatctccccaggtagccccgcattctgcgcagcctctcctatctctttcaaaaagggggtaatactgacccctttactgatgagtaatttacaacattgatctttattattactgtacacggctgataatatggcttcgcatgtctgacgagcataggccggatctttactcgcattacctttgatatccagactattgagcttttgcagcataaaatctttaacagttttactggttaataccgccctaccctcagaagcgttcccacgatgaaaatgggtagtcggtatgtctgtttgttgatgcaggctaaaacgatctgacagactcgtcgacaggctgataaagctatttctaacggcagtaatactttttgcaaaaatgtccttctccgttgttttttcttttactggttcaacgtcacttctatggattctgtagtgctgggtggatagtgttatgttagtcacggtagttctccttttagataactatgcatagctacactttgtttatatttcttgctttcaaaaaatagccaccttctccacaaccatttttactcattgatatttataaattttattttcctgatggattttgttcttctgtcacttagcctgttttttttcggcgcaaggtgatcgacttttatcgaggaacatttttatcgggacaatcctgaacaggtaaaacatcacttcaattcaactactgcgtcacataaaacattcatgaatattattatttatgctgatgttgttacgattttgcccccattcgcaggctggctaccaattatcctgccagcgagttagccgctttttcaaaacctataaagtcgccacgccaaacctctccgtcactgtaatccttatctaaacatcaattaattaactgatttttatatattatgacttttcatgacgttcagaaaaactacaaatgaaatggattgacgcatctattagtggtcaaaaaaacgcgctacgagaaataatcagtaacaattgcaacactattccaatcataacgtaaactatatgataccaggtgattattattgcttttaggtaacatatctgtatggctgcttttaagcaacaatactctaacacaacatataacattataacttacaataggttaacaaatggaattacagcttatgcttaaccactttttcgagcgcgtcagaaaggatgcaaatttcaacgcatttctaatcgatctggaatataataatatcgcttattacatctattttgttgctaccggcaatgtgaaaattatcactcatgcaggccacttcatttctattaaaagcaatagaaagctgattaaagtcaattcaacaccgaatacgcaattaataaaattgatttcagctaaacacttttcgggggagcattcctatgaaaaatactgtactgatctggcaacggcaggcgtttttaaatggattgttgaattaaaccaaaaaactcgacaatactggtcgaaagacaaccaattattatatatagaaaatgtggtcatgccgctttaacaagccagggtaataatagcgtcagtcgtgacatccggcgtgttacgactgcgggttatccaatttagagaccataatgagagtctgactgcgagagttaccctgtgcagtccgaccgacgcagcaacgtttgacacgattctcgacaacagcatctcctggtgcaggagaaatgatattcaaagcgatatcgactaaaagctcaaaatatttgccttctatttatattctatctaattaataccctccaggaagtgtggcataattgcagaatctgtcaggattccgggagcataccggagcgtaatcgaaaaaacatctggagatgtatgagcaaggatgaaatcagttatcaaattctttaccggtactctctggaaaagctatacagtactcttgccagaagagtagataacgtgctgtcattcgccctcgtttttctcggggtcggcgtcaccataaacgtcgggagtccctttattctggggccaggcattgtgggtatcgccatactaaaaagagtactccgcttcggcacgcgatcagcacaggccgaccggcagtcccgcgcctggctgaaactttttaatactcagcaccgctttccttcagataaaacactgttccttgccttcacatcgcttgagcaagacgcgagtgaagtatggtccatgcttattggtcctgccatcgtcatgactgagaccgccctcggaaaaacgcccattgagccattgacggcgggtgaaaaactctgtgcatttttgagcggcgcgacgaaatcccagctagcagatcgcaattgaactgtcttctaaacgcctgcgccataccacagagatttagtataaaattaattaatggagtactaacgctgtcagcaggtttctctgagtgaaagattcgtattatacgcacagcccagtttacagtttatataacagcgctatatgtttttgtatccgtaccatgccgcctacaagcggctgtctgagtacctctagccgtgccagggggtattagctcaaatgtgagctgacatatctatggcacagcgccaaacctaatctgactgtccgccctgtgccagaagcggacgctgatcatggtgtgtacaggccaacaatacgatatattttaaagctacctgattacagctttcataaagctatgggtattcaaatgcagcaaagctataaaccgggcttaattaaataatgcctttgcgaacctactttaggaaagtccggtagcgacatttgaagtatatacccctgtttttcataaaaagggagagcctggaagctaaaggtatctacaagtccatgaacacagcctttccgcaaaccttctttttcggccatcgccataagtttgctccccagaccgcagttccttgcagattcacttacccaaagatagtcgatgcagagccacggaccttttctgtcagcaattaatccgcctaccatttcgccgctttcgtttctgcagtagaccccaagctgcccatttttactaaaatcgacgaactgagcattgtagcttcttaatccggttaatagttcttctttatcaaattcagtaacttgatgtgtgatttgaatgtccatacatgcccaattgaacaagtttgtatttggaatataacgttataaataagttaattaaatgtatcaatagaaagtttgtttttactcctgggggcaggtcacgtccgctactcgcttaaagcaaactgtcagttggagtctgagctggtacaattaatgtgccactggttagaaatcagtaatacgattttatcaggctggtgctctggcctgtcaggatttgaggtatccacccggtttaccagccccctgtatttggcaccagtggaacccacttcccgatccaggatatccagtacccaccaccgaacctctttccccaaaagacatgagcaacctcaagcgccttgtctggatgataaccacggtatgaagtttgataacacgtggaatcagggcgtatgattcgctctccgttcagcaactggacgcccttctccccagcctttcagcgttgaagatttgccagcgctgggtgaagagtataggcgaattatgaaaatcatttctgccgtttatacttcgaaaaagacgttatcaaaaaggtggttcgcaagcgcggagttattaaacctttacttaacgaaatacggtttaagttgcttgaattgcagcagaaagaaaacgacggcttgctgatgctggacaaattaagcaagcatggcatcaatggactgatacgccgtcaataaaaggaagggtgcatggacgatcccgtcacatcaccaatcacaacagaagagcacaaaacaacatttcacagtgtaaaggataaaacacgatgccattttcaatcaaaaacatatgttcaggtccaaaaggacattgcccagaaatctccagccctatacaggacaagccagtaccgaggaattgcacactgacctcaacaacatgcgatatacagagctatacagtattcagcagatggtcctgcagttatgaaatgcgcccacccggtgcagaagaaagaaccccacgactaaaattctcagcaacggagctctcatggctatctaaaacaatagaaacagagaggcgcaacacaaaagaatgagcctgtcagtaattctgtgtaactgcccagttattaaaggtgatcgctcaggcggtcaccgaactcgataataaaacggctcatcgccagccgccagttctggatcggcatactccattttttgacgcatccttgatcgccagataaataacttttcgtactgagtcatccgtcgggaacaccttgcgtttcttaatcgcggcacggatcacgcagttcagggattagattgcgtttgtggtgtagatggccttgcggatatccggcggataactgaagagcgtattgaggttttcccagtgcgcacgccagcttttgctgatttgcggatatttatcgtcccgggctttcgcgaacgcatccatcgccatcagtgccgcctcttcggtcggagcctgaggccgctggtggcgactttgtagcctttccaggctacgtatttcagactgttacgcaccatatggataatgcacagctggatatggggctgcgggaagacgctgtttatcgcatccgggaaacccttcagaccatccacacaggcaatcaggatgtcctgaacgccccgggttttcagctccgtcagcacgcttagccagaacttttcgccttcattttcggccagccacatacccagtaactctttctggccttcggtgttgatacccagtgccaggaagacggctttgttgattacgctgccattctgacggactttgacgacaatgcagtccatataaacaatggggtacagcgcatccggttgccggttttgcctctcagtgacctgctcttttacggcgtcggtgactttagatatcagcgagggtgacacattggcgtcgtacatctctttgaaggtggcgacgatttcgcgggtagtcatgcctttggcgtagagggataaaatttggctgtccatctgcgtaatgcgcgtctggtgcttcttaagcagctgtggttcgaaggtgttttcacggtcacgcggtgtgttgagttctatctcgccgtcatcgcacaacaccgttttggacgagtagccattacgggtgtttgagcctgttttgggcgcatttttctcatacccggggtggtcagccagctccgcattgagcaccgtttcgacggttaatttcgccagcatacgggaaaacgaattgaggtcggcttcggttttaaggcctttagccagttcaaccgcaagggctttgagtttcttttcgtccataattgcctgtctccgttactggagtgaacatatcaaagacaggcaattacacaattttacttacagtctcagttcagtcacattattgatgagcgactgtacgttaagcaaatcaagaccgggatgaaaatcgctctgccactttcgctcaaccttccttccatgggtttacgcctcagtacggtgattgagcgttgccgcctggtaagccgtagcgaataccttatcagcgctggcatacgcaaaaacagcccgaacgggagtattcatcctaatagcctgactaaaaaatttgttgcggcacgaaaattgaccggaataaatttcagtgaaaacccaccgccgtttcacgagatccgcagcttatccggacgactgtataaagacgcttacggcgaagggtttgctcagaaactcctgggacatacttcagagaacaccacgaaactctatctcgatgaacgcgataataaagcttacgtgatgctctgattttgctgtaaaagaaatgttaaactggatttggatctgatataacgaaaaagcccggaatacagaaattctggaaaatttcggaaatttcggaaatttcggattattgatcataagcaactgatttataagaaaaaaagagaccgaatacgattcccgcttacggcaaccattgatatttctctttaaattcataatgttacatattaattaagtgattttaacgattggaatatgttatttttgattctaatagattcaattagttatcactttttacgttttaattcggacatatttcgggccattttgcgtataaatcccccgaccaaacaaattaactgcccaatacatcactcccctcttccattgggggactcccgatgccaaatacccatgtagacgaaggcttaatagtgatgccaacaaaagcgatcgcgaaaagttgaacaggtggctagtttcagattaaacacattggttagtcatcttgaacaagtaaaatccgccgcaactggcaaccattcaatactcgcactatcgaacgatcgccagcttgccgcagcccgttcttgcatacgatgtggctgcggttccatcacatcaggaatgtgaaaatcgggataaacctgccacttaacctgaagcaggtcttcatagcgggtggtataccgaggcgaaagcatttctcttaaggtcgccatataaaaacattctattacaacgagttatctcctcctgcctccgccccggcgcaaagctatagttttttctatctccttgtgaaacaaacaattattcttgctatggcgctgattaacaatcgttcgcgggcaacgtacattcagcgagtttcagagcttcctgacggaattcagccggtgctgtttctggggcttcttactggttgatacagatcctgcctcttacttgagaatttactcatttagccgtatgtccattatgggtggataagatcatttatcatcgtaagggttgaaagcgataagttaaacttgtcctggctcaacaagggacccgactaatgatgagctcttcatcttcaaggcgttttatgccttccagcaagaatagacattaaatcgacaactgctgccaggtcttacaggcgcagtggacaatcgtgtggtaacagcctgagtcatttattatttttctcattcagcataactgcgtcttctgatagagaaatttttatctaaacatataaaaaacacagtgaagaaaacgctacttttttctagctaaaaagctaaattaatttttttacggagaggatcttatgcgcaaggtgtcgatatctatattattcatgctagtttcactgacttgggggactacatggttggccatgcgaattgccgttgaaactatccctccagtgtttgcaaccggaatgaggtttatgtttgcagcaccttttttaatcatcattgcatggttaagaaaaaaaacaactgttgtttcctcccggacaacgattattccagtttgtgatatgcatcttttatttttgcattcctttctcactaatgatttatggtgaaacctatgtcaactctgggcttgccgccattatctttgcgaatatgcctgtggccgttttgatagcatcggttttgtttctaaatgaaaaagcgaaactaatgcagatcgcgggcttaactatcgcaatcactgcattgacggggatacttcttgaagaaacgaatacaagtacagagagtcactggcagggtatcactgcgcttatttctgctgtgttaatccatgccataatatatacacaatgtaagaaaagaagttgtactgtctctgttatcacatttaatgcgctcccgtgccttttagctgggttgatactttctgcgacaggatggttttttgaaagaccacaagtatcaaccttctcagtacactcaatattagctaccctgtatctcggggcttttgccggagtttttggtatcctgtgctactttgcgcttcagcaaaaggctaatgccttccaggcttcgcttgtatttcttatctttccgctgattgcggtaagtctggaagactatatttatggatatgctatttcaacacactcaatgctgcttattataccattagttatcgggatatttcttactcttgtcgccagaaatctccctgtaaccagcagatgccgggataactcatcacagaaataatcgatttataataacgcaaataattcctgatgccttactgagctccggctaatgcggggtggataagctggaatacagacccggtaatacacagcgattatattaacaagcaatgtaataaaggagttttttatgttcatgtttctgccattcttgcttgcactgagcgtggcaatgggggccataaacagaaaggataaagtcagctacattctgtgggccgttttactcatcgtcactattttatcattcattcatcatatgaccaattcgctgactttgtcattttaaggagtgtgtatgaaaacgcatcatcatccaacaacatttgttcatctgattaatcaggtgggactccttgggatatgcgttgctctggttgtagccttttattatcaactcgtcaggcatgagctgccttgtccaatttgcttattacagcgggctggcctcatcatcgccggttttggctttttatttaacctctgctttggtctacgaggtatacattacgggatggtaattattggcagtatcctgaccggagttatggcatcccggcaaatatgtttgcatatcatgcccggtgacacaggatatggttctgcattttttggattacacttttatacctggactctgattacgtcaattctgattattattgctgttgcggtaattctggcaatcagtagcatgaatgttgcatttcgttcattgaatattaatccggacctgttcagtattgtcggttgggtatttctgttactgattactgccaaccttatttcaactgtactggaatgtggcggaggggaatgtgctgctaacccggtcacatataagctactgtcgaaacaggatattgcctttctgaaaacaggcctcctgacgaggacagttctccggttatgacgcacttttaaaatgactgattggtaaatatatagcaagcacctgtcttgtagaaattggaatggttatgggctaacacggaagttacagtaacattgaaatgttgcaataacaggaatcaaacttacaaccttcgcattacgaattagtagaatcacatttaactaactgtttcaaatacacatttccgcattcacattgctcaactcaatggcacatgatgttagaaatagaatgatgcttcaccatgtttgacacaaaaatggcacaccctataaagcatccacagcacatatttgggtggcacgcaccgtggaaatactgcattaccctaacacagggaattttctgtacagcgtcgacagccccgcatcataaataatcgctacctgctgtcgcggtactcctgccctaataaggcaccctgcctgcgcccattgctccggcgtcagttttggcctacggccaccaatgtagtggcactgtagtggcacactgggtactgaagcaatggccacaactggcgcttgatgctatcagccagataaccttccagatggataacaaacatagcagctatcctgtctgtatcggaattgtaaaaccagacgttgaccatcttcatcaaggttaaaggaacaaagagctctttaaagtaactctttgttccattacgatagtttaaatatgatgttctgaatgggccttcactacatgaacaggaaaggctcaggataaccacttctcagacattaaaagcaaatgagaaaaccaagggggcctaaacctgccgccagggaacaaacctttgcacagtctgcagtgctaccaccgtcccctatgcaccccagggcgaacgctggctgggcagcagacgacaacagcagaagagttgttatgaataaaactttacgtgatttaataagagaaaacatattattaccctcatagtaagcagtattaaataagccgggatatatctgatgttcaatcagtccctcatatagggttagcaccatagcgagtcgttttcacaaaaaacacagactgttgaaactttatttatcactttgacatttgcaatacatgacacatgattagcttcagccgccattatagggaaagctccatttccatactcatttactcacttctccctgcggaaaaagaaatgcagtatagccagcgtggtgcttttgctgaaaccaggcgcgagcaacacggcaatgatgatcggcgtcagaatgagttcggaatcggcattggcaaacaaggcgcacagtcgttaatacccaccagcagttccgccaagagtgcgacaatgtcgtaagagaggccttcagccaggcaaaacagcgctacggtgcgccccggcttgctgaggaagtgaacctggggcctgaggtacaatgtaaaaacgatagcgtccagcctgtgccatcagggtctgcggcgatctcagtccggaacaatttgaaaaccagaacctcgcttaaggctgtgtccacaatacgcggacaggatcaaaactgttagtgtggctggcttacaagaatgaagtgaagttgattgatataacaaacactcctgataatgttaactggcctgttcctccgggggagcgagccagccatgatttgaaaagcacatgaaatcactttcacatgaattaatttacattggaaataaaatataatagtgcttatcatttttatttaagttaaatattttataaatggtttttatttactcacctgatggtaatgaataacgtttaatatctatagtaaaggatgctgtaaccgtaaggatagtgtgccacaatttaacaggtaacatattatgaaacacgtcaagagcgtatttttagcaatggttttaatattaccatcttcactatatcctgctcttacaatagcggcagactctcaagatcataaaaaagaagaaacaattaagccaatgcctcaaaagtggtgtaatctttggcctgctggcatacccttccctgaagattggtttaaaatgtgtagaggttattgagtataaatttaatatactagccagtaaccatatcagttatgacagacaggccttcttcatatttgctataaataaggcctgagctttcctgacaaattataaactactggctggtttctccggccagacaggctttaaagtatcaacacggtttacctgtacccggtactttctccatgccagaagagaagctttttctttattggttgcttcgtccagatccactgcatcctgtaacggcgcgattttttcagacgctatttgcaggagtctgtttttcgttccttcagcttcacgaagtctggctgcggcctccgcagcttcatcattcatccagacctgagccttactatcccattttttgtatccaccacctggtgaaactgatgtgacgttttcaggtagcggaccaagatcggagatataaacctgattgccggttgttgtgtcgtaaaccgtctcgccgcggtgatcctcctgcagactccacgtttgggtttcagcgtcaaaaacagcaatatgactggagggaatatcaggaggggctatatcagtacaatttgccgggcgacgctgtccgggggggacctgaccacatccggcccccattgcaggtaatgcaacagatgtaattttccggtcttctccggcgcttttattgtgctgaaaaattgccagtaacgcagcccgtgttgcattataaaccgcgtcggtgccgtcaataatcagcggaacgcgcatcgtcggggcgggaaccagccacggatgtttactgttacccgtttcaataacaaaggcggtgccgacgggctgttcccccaggtattcacggatgatattttgctgtacccgttcctgtaattgcgacccgaaatatgccgtaatagcagcatccacaccgccgtccataagaccaaaggtttccgcattaccgtctgcgtccacaataacgacgtgtccgtgtggaccgatatacatggtgtgctcgtgtcctccgatataaactgtatgcgcatggtcgccagcggcctgtgtccacgcaccacctcctagctgaaatgaagtgtgattggaatctccccagtatgaattgatataaccgccgaactggttagtatgattgcccgtggtattaacgccccttttcggagtcaaaccagttcttacgctcttttggagtcattttattcgggtcctgatgttcagcagcctgggaaacgggcgtttccatcagtacgcggatcacatccgtcaggagatacagcttgtttttttcattgcttcccagtgccaggggaacgcccgagaggcgactgacaaccgtctgtcgatgtaaccctgtaatagcggcaagctgactgatattgcatttgaggttcttcagttcgccgtccatttttacctctggggctgtttcttagcgcgccctcccccggaaaaacaaaatataatgaacaaaaaacatacaaaccatcatcttttaaaaataaattacattaaaacagagagttacaacatgatgatgatgcatgaaaaatcaaaaatgcgccaaatcccgcgccgctgccgccccgtggcaggccgccccgccgggagtacctttttaaaatgcgaacaattatcaacaactaccacttaatgattatttatttcattttgcgatattgattatcattttcaataacaacacacagagaacataaatgaaaaatatcatcactattatcgtagccattattatcgttttttatgcaggtatgtggtcgcagaaattcctgatggaagatgagtgccttgattcaggtggttcatacaatgaaaatggaatttgcaatattgcaggcagtcatcaggatgttccccctaagtaagcagaatgctttttaaattcgttacccacctctacagataaggaggcgaatggtcactaaaagtaaaatccattgcagaagaatttccggaaagttgttattccagcaccccgacaggttattcagacagatttcagctatatcaaaactgagtgagtacttatcagtttcatctggtgaaaaacctgttcttattcatctggttccatctgatgatatgtagtcacttttttacagcaatattacagggggagtttcaatgcctcctgtaattatttgactctctcaccgaatcatatactcgttcacacgtcattcctgcccggtagcgctcgtcagcgattccagcataatgtttagctgcttctgcaatatctccgagcatgttggcaagcattctggcgtcggcgttggttgttttgcttctgacggcagcggcaagatttgcggtgtgctttgcggcgtccaggcgggtggcaagtttttttgcttcggtacgcagctggctaacagtggcagacaggccagcagcagtggcagcagatttagcggcttgcgcttgtgcatctttcacagcctcatcacgggcaataacgcggccctgttcaataatacgggcggcggtctgggcgttgacttcctgagaggattcagcgctgtcgcgatctgcccattttttttgccagcccctgtcactccagacattaccggcgataaacgcaccagccatcagcaaaataaacaccagctgcaaccagtatcttttcagaagagcagataacagattcataccagcaccgattttgctttctcaaagcgctcccgccgatcaccgatgccgttctaccctccgttgatgatctgcgtaacacgtaccaggtcgccggaatatttcagacaccctttagtcacaaaaagccacgctgcggatcgggcggcatgacgttctagctcaagctgtcctggattcgccactagatccagtttcagtgcaacgccacatctggtgtaattctccagcccggtaatcctgatcttcgccgaacgtggtgcgaaagctttcttgccgttcatggcgttcgcgatccggactggtacgaatatgtgcctgataacaccccaacaacccatgaagaaaatgcagcaaggcttagtcaggcgggcaaatgtctgcgggatattgaggcagggagatttcagtgtgatgaagaaaaacagcaaccgacaggcgaactggcagatgaaccagcaacgcctgaagcagtggaacaggacacaactgaacatcatccggacccacagccgctggagaatgaaccacctgtaagccagacagaagcaggctaccagaaaatacgggcagaactgcacgaagcacgtaaaaacattccacccaaaaacccggttgatgttggtaaacaactggcagccgcgcgcggtgaatatgtcgaagacatcagcgacccgaacgatccgaggtgggttcataacaattacagcgcctcaaatcagggtgaaaaagaagaagtggtgccggagggaaaacaaccagcagcagagccggaggctgtcaccagaaacgcggacgggactttcgatgtatcagcgctattcctgcccccctcaaaccagaccgaaaaaacggaagccagaacagaaagagatggagaaacgccgaaagagagcaaccagcaggaaacggctggcgatacaggacaggaaattacaacggacggtggatcaggtacaacttcatagcgcaaaaccacacgccagtggcgcttattgaaaaactaaaaggaacggactcattcactgtgtccgcatggattgatcgctatgaggttttattacagcgccggaatctgtcggttaatacctacaagattcgcagtaatcaattagcgaccgtacgcgaaaaaatgggagaaataatactggcagaagtaacaacccggcacattgccaagtttcttgagtcgtggataaccgagggaaaaaacactatggcgggagcaatgagatcagttctatctgacatgttcagagaggctattgtcgaagggcatattgtgaaaaacccggtggaagcaacccggataccagagattaaggtggccagggaacgcctgcaactggaaacgtataacgccacacgagcggcagcagagcatatgcctgcatggttccctctcgcgatggatttagcgctcgttactggtcaacgtagggaggatatcgtaaatatgaaatttagtgatgtttttgacaaccgcttatacgtcactcagattaaaaccggaatgaaaatagccattcccctctccctgacacttcgggcgacggggttacgtctgggaacggtaatcgatcgctgccgacttgtaagccgcactgatttcatgatcagtgccggaatcaggaaaaatagcccgaccgggaatattcatccggatggattgacaaagacatttgtaaaagcaagaaaagcctccggtgttaacttcagcaataatccaccgacatttcacgagatccgaagtctggccgggcggctgtacaaaaacgagcacggcgaggtgttcgcccaaaaactcctgggccacacatcagagaacaccacgaaactctatctcgatgaacgcgataataaagcttacgtgatgctctgattttgttgtaaaagaaatgttaaactggatttggatgtgatataaccaaaaagaccggaatacagaaattcgaggaaatttcgaggaatttcgaggggaaacacataacccattgatttataatctaaataaaaagagaccgaatacgattcctgtattcggtccagggaaatggctcttgggagagagccgtgcgctaaaagttggcattaatgcaggctaaatcgccttgccctttaagaatagatgacgacgccaggttttccagtttgcgacgaaggtgattgaaaaaacctggcgttttgtctgttatcagagataaaaaaaccgtaagccttttcgtgaaggtttacggttttttattaaaaatcagtcagctattggatggatcacaaagcttttgcgcacgttcgataaacggcgccagactcattttctcaccgggcttcgccgggttatcgatttgaatgacggcaataggctgagcgcgcgttttaccctccgctacttgctgttcggcaatggcattcaagggatactgcaccagcgtactggggttgatcacatagagcgcctggccaggccgacaggtcaacatgacctcttcccgattaaacgcccacttgtcttttcctacttcaaaacgacttacggtaatcacctgcggcgccgccaacgctacgcccgaagtggccagcagaagcgccggaaggagtatttttttcattcgttatgccagtccatcaaaaaggttcgagggttgcaaacaggctgacgatcgccagaactatgcctccaactccccattcaatttgcgtcatcctgacaaaccataggtcagtccggggattttcctgtcgcatacgtggtacgagaacataccgattcgtcagcgcaattgctaccataagcacgaccagcgcacattttaacaaaagcaactgtccataggtggtctgccagatagcggtaaatcccgtgataaatagcgtgttgccaatgcctgtgagcaatacgcccgccacaaaaaagtgaccataacgagaaaaacgcatcatggcgctaatagcatgttgacgccagcgtccctgagccatgcgcatacaataaaccactggcaacagcccgccaaaccaggctgcggcacagagtaaatgcagagcatggttaatctgctgtaatgttcccgctacaccgtcgcgcatcgtcgcatgtccaacgcctgccagcaggataaactgagcaacggttagaataagaagccgtcgttgcatttttaccggcgcaatgactaccaccgccagcgtgaccagcgcgaggataatttgccatatccagaccgcgccaaagcgggtttgcagtaccgcgccccacaccgagacgaaaaaaacatcgggccagccgccgcccatcagtccgccctgaaccgccagcatgaaagccgcgctgataacgctccaggcggcggcatgttgttgcagatgtaaaaatcgacgcgtcattaaacgacgaattgatgcgggtgccagccaggcaccgtaaagcgcgcagccgtagaccagcatcacactagcaaaatgaataaatcggagagttatccagacgaatgtcagcatcatttatttcacgctgaaggtgtatttcccttttgttttatgtccatccaccgacacaacgtgccagtctaccgtgtaagcgccagattttaacggctgctcaagcgggataatcaactgcgttttatcctgttcatttcgctttgccgggcgcgttttgatgagctcttgctgagggccagtaatggttgcgccgctgaaccctggctcaatcccttcagaaaagttcagggtcagcgcctgtggcgaggccgtaacggcagcattcgccgctggatactgatgcgtcaggtgcgcatgtgcccaggccgctggcgtcgcaaatgtcgatgccagcagcagtaaagctaaacgtcgcgatggtgcagaagaagccatattcactattcctttttgttatacctacgttacaaagaataaccttcaacaatcaatgagtcgaggatcatcatttccatcttgccattaccgcggactcttagtaccttctggcggcaacaaaaaaggagacacgtatgaaaacaaatctggctcagcttgaacaagcggaaatggataaagtcaatgtggacctggcggcagccggggtggcatttaaagagcgctacaatatgccagttgtcgcggaggcggtcgaacgtgagcagccagagcatctacgcgcctggtttcgcgagcggctgattgcccatcgtctggcttccgtatcactatcccgactcccttacgaacccaaagttaaataaaaattatataacgttacacttccttacatgcagacgactacattataaggcgattcttaacctatgctttttagaatggctgtagagactatgaaaaggaagtcattatgtcctcctggaaaattgctgctgcgcagtatgcgcccctgaacgcctcgccggcggagcatgtcgcccatcatctggaatatattgagcttgcggctcgtcaacagtgcgaactgctggtctttccgtcactgtcgctattaggctgcgacgaaaggaataaatcgttgcccgccccgcctgacgaggcgcttttacagccgctcactcatgcggccgatacccaccatatgactatcattgtgggtatgcctgttgagcataactgccgcttcgtaaaaggcatcgctatttttgccccatggctaacgtcgccgctcatgtttcacaaaagtcatggcgcctgtattgccaggcagcgaagcgctatcaacgtggtggatgagcagccagaaggtggtgatatagatccctcatttacgttattcacaaccagtcaatgtcttaacgaacctgaactccatgcttctacctcacgcttacaacgtttttcgcataaatatgcgctggccgtactgatggccaatgcctgtggaagtagcgctctgtggaatgaaagcgggcaacttattgttcgtgccgattgcggttcgctattactgacgggcctgcgcacaacggagggttggcaaggcgatatcattccattacgctaaggtctttcggtgaggaatgaatcatgttgcggattatagacacggaaacctgcgggctgcagggcgggatcgtagagatagcctctgttgatgtcattgatggcaacattgtcaatcccatgagtcacctgatacgccccgatcgccctattacgccgcaggcgatggcgatacaccgtattaccgaagccatggtcgccgataagccgtggattgaagatgtcataccgctttattacggtagtgagtggtatgtcgctcacaatgccagtttcgacagacgcgtattacctgaattgccgggtgagtggatctgtaccatgaagttgtcgcgacgcctgtggccgggaataaaatacagcaatatggcgctctataaatcgcgcaaactaagcgtacaaacgccgccggggctgcaccatcaccgggcgctttatgattgctatatcaccgccgccttgctgattgatattatgcgaaccaccggctggaccgcggaagagatggtcaatattacgggccgtcctgcgctgttaaccactttcccgttcggtaaataccgcggtaaggcggtatctgaagtcgcaaaacgcgatccgggctatttacgctggctttttaataaccttgataatatgagcccggagcttcgcctgacgcttaaacactacctggaagatgttcaggctggcgagcaacgcagcaatggaacaccacaataacccgcgacgctcacaagccgttgcgggcgcgcgtctatgcgctatgtaaggttccctgcgccaggccgattaaaaaggcgaactccagcgcgacgccttcgtaggatttaaaccgccccgacttaccaccgtgcccggagtccatatccgtacataacagcagcagacgttggtccgtttttagctcgcgtaattttgccacccacttcgccggttcccagtattgcacctgggagtcgtgcaatcctgtcgtcaccagcaggtgcggatagtcctgcgctttgacattgtcataaggactatagcttttcatatagtcataatactcaatatcctgcgggttcccccactcttcaaactctcctgtcgttagtgggatcgactcatccagcatcgtggttaatacatcaacaaagggtacctgggcaataacgccgtggaaaagctcggggcgttcgttgatagcgacgcccattagcattccgcccgcgctcccgcccatcccataacacagcgacggcgaaccgtaacccagttttaataaggcatcgcaggcatcaagatagtcattaaaagtattccgctttttgaggaacttgccatcttcataccactgctgccccagctcaccgccgccgcgaacgtgtacgattgcgtaaacaaagccacgatccagcaagctcagtcggctgctgctgaagtcggcgtcaatactggaaccgtaagatccgtaaccgtaaaccagaagcggattttgccctttacgaaaatacttctgatgataaaccagcgataccggcacttcgacgccgtcgcgtgcggtgatccacaggtgttcgctctgataacagccagaatcaaacccaggcacttccgtctgtttaagtacccgtcgttctccggtatccatatccagttcaaacaaggtatctggcgtcgtcattgaagaatagccgtaacgcagccgggaggtctcaggttcgggattataggcaagccacgtcacgtaagccggatcgtcaaaggcgatgcctatcacttcacgggttttacggttaatttgccgcaggctggtaagcccccgttgacgctcttcgaccactaaccagtcggtaaacagggtaaacccttccagcataatatgctcgcgcggagggatcagctcttcccaggcgttttcattgcgcacgcgggtacggtacaacccaaagtttttaccgttccggttagaacgcaggtaaaacttatgttgatagtgatcgagactatattcatggtctttgcggcgcggtaaaaatgaaaacggctcggcatcggccagttccgcgtcaagtaatagcacttcgctagtggtggcgctggcaaggtgaatcaccacataatgctgcgaagtggttttatgcaggctgacataaaaggtatcgtctttctcctcatataccagttcatcttgcgatgacggagtgccaatcgtgtgccgccaaacctgatagggcagcagcgtcttcttatgcttacgcacatagtaaagggtcagggaatcattggcccagacaaattcaggcgcaacgttatccagcagttccggataccagttaccgctttcgaggttacgaaaacgcaacccatactgacgacgggataaataatcttctgccagcgccatgatggtattatccggcgtaatggcaagtccaccgagcgtataaaattcgctgtgcgcggcccgctggttcgcatcgagcaaggtttcccacacatcccactcttcgcttaacgccgattgtcgttgatagatggcatattcgcagccgggttcatagatataacggtagcgatagccatttttcacatacggagcggaaacttctctgggcgggatgcgatcgataatttcttttagaatgcggtcctgtaacgcctgctgagaggtcatgaccttccggccatactcattttcctgatgcaggtaatcaaggacttccggctgcgagcgagtgtcatctcgcagccagtaataattatcaatgcgcgtatcgccatgtacggtcatggcatagggaattcgattggcttttggcaacatgtcgttttttcttttgcgttaatatttgttatatatcacgcggcaaacacagcggcgtagcatggtagtcccggtcgctcacctcggtaagcgcctgagatgtcactgcttcgccgctatcttgcaacatgaatgacgtaaactatccatcctataagggtggcaaaagacacgcatgatgcaagcgaaacatgttacttaatggcaggttatcagcctggtagcgcctgtttttgctgctgcaagtcctgctcgataccgtcccgaacctcctgaggaatttttagcgcgtctcctaacgcattcagatagctacgttccataaagtggtcaatatcaatggcggcgcagctcaggaagtagatttccagggcttcttcttcattgcgaatgccctgtgccagacgttgtggatcaagcggctgctcaatagctttttcgataaacacacgcccttgctcttcaacacctgattctcgcagttggtgctcaatcgccgcgcgttctttggcatcaatatgcccatcgctttttgcagcaaaaaccagcgccaggatcagtcgctcagtgcgaacatccagcggcgtactttggctgccgaattgcggctccccctgatgcgcggcgcgtactttatctttgtacttattccacaatacggaacccgccaccgcgccgccgcccaccagcaaagcgccagtaccgtatttggttaataatttgcgcgaagacttattggcgaccaacagtccagccagaccgcccagcgcgccgggaaccagcagtttatttaacccctgttcaccggaaggcgatgcggaagcgcctttttgcccaagaagtgattgtaattggttcaaccagttagccatagtacccctcaaatacagaccaataatggtcaagcgtacctgaggggatgtcaggaattgtctgttccggcaaaagaagcgcaaattacgctgctagcggggcttatattccgccttgccggctttgcaatcaacgatgacctgataatgaatatcggcgcttttaccgcgaacagttagcggaactgtccatttatcattttgacccacaacgtcctgcacattaacccacgcgaccgggtcagcctgcccgacctttttttggtcgtcggcccaccgcacgatacgattttgctggtagtcgcgcttcacgcttgccgcaatcccggcggcatccagcccttcgcactgcggaaacttaaccgatttactctcggtggatgccgcaaatgccgatacgctggcggataaaaacagcaggctcaacaacgctcctcttttattcatacttttctccttagcacaatgattcaggaaaagcatggtacaaaacgccgggagcgcaagtgtgggttcaggcggcttgctttttcgttttactcgcggcgtccttttcaaccgcctgcggagaaggcaacttaccggttttgaggatagtgcttaacacctctttatgttccgccagccacagcgacaacgcttcgcgctgcccatcttccagcacgactggcgactgctcaagccaggtatcaagaagatcggcagtatcgagcattttgtcccaggcgtcggcttcctttttactggtaaatgacatcttctcctcaccctcgcgaatgactacgtatttaacttcaaccgccattttgcagccccttatttagctgtgtttatatacagtatattgcaaggcagcaagaaaagcaatttattcgaaaagacatacgcaaacgttttcgtatatactgcgcgcaggtaaataaggggacagaaatatgacgctattaggcactgcgctgcgtccggcagcaacgcgagtgatgttattaggggcaggagaattaggaaaagaggtggcgattgaatgccaacgcctggggatcgaggttatcgccgtcgatcgctatcctgatgctcccgccatgcatgtggctcaccgttcacacgtcattaatatgctggacggcgaggcgctacgtcatgtgattacagaggaaaaaccgcattatatcgtgccggaaatagaagcgatcgccaccgatacgctgcgcgagctggagggcgaagggctgaatgtcgtgccttgcgcccgtgcaacgcagctcacgatgaaccgcgaagggatccgtcgcctggccgcagaagaattaggactgccgacatcgacgtatcgctttgccgacagtgaggccagttttcatgatgcggtagccgcagtgggttttccttgcatcgtcaaaccggtcatgagctcttccggcaaaggccagagctttatccgctcggccgaacagctcgcgcaggcatgggagtatgctcaacagggcggacgcgctggcgcgggtcgcgtgattgtggaaggcgtggttaaatttgattttgaaattacgctgctcaccgttagcgccgtcgatggcgtgcatttctgcgcgccggtcggtcatcgtcagcaagatggtgactatcgcgaatcctggcagccacagcagatgagcgaactggcgctgaagcgggcgcaagagattgctcgtcatgtggtactggcgttaggcggtcatggcctgttcggcgttgaactcttcgtctgtggcgatgaagtcattttcagcgaagtctcccctcgcccgcacgataccggaatggtcacgttgatttctcaggatctctctgagtttgcgctgcatgtgcgcgcctttctgggaatgcccgtaggcgctattcgccagtatggtcccgctgcctcggccgtgattctgccgcagcttaccagtcaaaatgtgacgtttgataatgtacacgcggcggtaggagccggagtgcaggtacggctgtttggtaagcctgagatcgacggcacccgtcgtcttggtgtagcgttagcgacaggtgaaaacgttgaagaagcggtgataagagcgaaaaaggccgtcagccgcgtgacggtaaaaggctaatgcgccatcgcctgatggcgacgttagcgcatttttatcagacctgcctgatcgccactcgtaagcccgataagcaagcgccatcgggcatttaacggcttactgcttcgcgccttctaccgcttcgcgcgccagtttggtgatgcgatcgtaatcacccgcttccagcgcgtcggccggcaccagccaggaaccgccgatgcacaacacgcttttcagcgccagatagtcacgatagtttgccggagagatgccgccagttgggcagaaacgtacctgagagaacggaccggcaatcgcctgcaacgctttagtgccgccattcgcttccgccgggaagaatttgaactctttcagaccatagtccatgcccaacatcagttcagaaacggtgctaataccgggaatcaatgggatagtgcctgccgtcgcggctttcagcagtggctcagtcagtcccgggctaatcgcaaattgcgcgcccgcttccgtcacctccgccaactgctgcggattgagaacggttccggcgccgacaatcgcttccggcacttctttagcgatagcgcgaatagcatccatcgcgcaggccgtacgtaaagtcacttccagaacgcgaacgcccccggccaccagcgctttagccatcggcaccgcgtgctccagtttattgactacaatgaccgggacaaccgggccggtggtcaggattgcttctgcacttgttttccagtttttcatcggaattcttctctcgcctgattactagtgtgtcatcttaaaaagtgatacaggttgcgccctgctccgcacccgacagcttttcgcgcagcgcgccaaacaactcacgccccgttccgacgcgcgacgcgctcaggtccggaatatgaggctgacgagcggcaagttccgcctcgtcgaccagcagagttaactcacctgtctgcccattcacgcgaatgatgtcgccatcgcgcacttttgccagtaagccgccatcgtaggcttccggcgttacgtggatagctgaaggcactttacccgaagcgcctgaaagtcgtccatcagtaactaacgcgattttgaaacggcggtccaataatacaccaagtggcggcatgagtttatgtaattctggcattccattcgcttttggtccctgatgacgcacgacaacgacacaatcccggtcaagcaggcccgcgtcaaacgcaggcagcacatcatgctgactttcaaataccatggcaggcgcttcaatgatctggttttcaaccggtaccgcagacgtcttcattactgcgcgccccagattaccgcttagcaccttagtaccgccgtgaggagagaacggcttatcaaaagaggcaatgacatcgttatccagtgacctttccgcgccttcacgccagtccagctcgccgttgttgagccagggctccagcgtatagcgtttcaggccgaagcctgcgacagtattaacgtcttcgtgcagcaatccggcattgagcagctcacgcatcaataccggtacgccgcccgccgcctggaagtggttaatgtccgccggaccgttcggatacagacgcgccatcaacggaaccacttccgacaaatccgagaagtcatcccagttgatcagaatgcccgccgcgcgcgccattgcaaccagatgcatggtgtggttggtggagccgccggtagccagcagcgcgacaatgccgttcaccacgactttttcgtcgatcattttaccgagcggcatccacgtattgccgttgccggtaagacgtgttacctgacgtgcggcagcggcagtcaatgcctcgcgcagcggcgcatccggatgcacaaacgaagaacccggcaactgcattcccataaactccaccaccatctggttggtgttggcggtgccgtaaaatgtacaggtgcccggcgcatggtaagaggcggcttccgactccagcagcgccattctgtctacttttccttccgcatatagctgacgaatacggactttttctttattcggcaggccgctcgccatcgggcctgacggaacaaaaatcgcgggtaaatgaccaaaagagagcgcggccatcgccagccccggaacgattttgtcgcatacgccgaggaataacgcgccgtcaaacatattgtgagagaggcctactgctgccgacatcgctatcacttcgcggctgagtaatgacaactccatgccatcctgcccttgcgtaacgccatcgcacattgccggtacgccgcctgcgacctgacctaccgcattcacggaatgcagggcctgacgaataatctgcggataatgttcatacggttgatgcgcagagagcatgtcattgtaggaggtaataatggcgatattattgcgcaacatacttttcagcgaggctttgtcctctggctgacaggcagcgaagccatgcgccaggttgccgcaggccagttgagatcggtggaccgtggcggttttcgcctgctcaatgcgggcaagataggcttctcgggtctgctgcgagcgttcgacaatacgctgtgttacgcgtaacaaattaggattcatagaggctcctgaaatttatctgtccggctaccgggtttaccatgcgtttcatcaatgtggaaagacagtgaaatacatgatgtccggtgataatggggcaaaatcgtttcaggcagtgtaataaaaaaagcctcgcaggtgaatccacacgaggcttaaaagtgcaaaaatgattctacaatctgtgttagatcatgttaccggtaaaataccacctaagagtgagtggcaaatttactcaaactcattccacgaacgaccgtcacgggtaatcatcgccacggacgctaccggtccccaggtgcccgcctgatacggcttcggcgcgtcgttgtccatcgcccatgcttcggtaatggagtccacccacttccaggcttcttccacttcgtcacggcggacaaacagcgcctgaatgccacgcatcgtttccagcagcaggcgttcataggcatccgccaggtgcgtctgattaaaggtctcggagtagctcagatcaagcttcgtgatctgcagattatgcttatgatccagccccggtactttgttaagcacctgaatatctacgccttcatccggctgcaggcgaatcgtcaatttgttctgcggcaggtcttgccaggactctttaaagaggttcagttcaggcgtcttgaaataaaccacgacttcagagcacttggttggcagacgcttgccggtgcgcagatagaatggcacgcccgcccaacgccagttatcgatgtcgacgcggatcgcgacgaatgtttcggtgttgctgcttttattcgcgccctcttcttccagatagcccggcaccttttgcccctgcgcaaagcccgcggtgtattgaccacgaaccgttttttcacgcacgttggagcgatcaatccggcgcagcgatttcaacactttgactttttcatcgcgaatactgtcggcgctcaggtcagacggcggtgacatggcaatcatgcagagaatttgcagcaagtggttctggatcatatcgcgcatctgaccggcctggtcaaagtatccccagcgcccttcaatccccacctcttccgctacggtaatctcaacgtgatcgatagtgcggttatcccagttattaacgaataacgagttggcaaaacgcagcgccagcaggttgagaaccgtttctttacccagatagtggtcgatacgatatacctggcactcttcaaagtattcgccgacccgatcgttaatctcacgcgaggtcgccagcgaagtacccaacggtttttccatcacgacgcgcgccggtttggcgttgagtttagcctctcctaaccctttgcaaatagcgccaaaggtgctgggcggcatcgcaaaatagttaatggtggtgcggtttttttgatccagcatatcgcccaggcgactaaacgcaggcgtatcgttaacgtcaagattacaaaaatccagacggccgctcagcgtatcccacaagccttcatcaattttttccttcatgaaggtttccagcgcttcacgcacaacgtgggtataggcttctttatcccagtccgcgcgccccaccccaatgatacgggtatccggatggatctggccggctttctcaagctgatacagggaaggcagcaatttccggcgcgccaggtcgcctttcgcgccgaaaatgaccaggtcacatgcctgggctgtttgcgttaccgccatgtcattctccttagttaatctcctggtactttagccaggatatcgttgtaattttattacacagcactgtactgcttttacgagattacggaaaccgtaaacgccttttcatggatgaaccggcgtttgattggcaatataatcggcaaaacgcctaataaaattgtcgcttttccacacaagctggaacttaaaatccgacgtcggtcatgtaatgaaaaaaaacgacaccttttttagccattttgcccccttcggcagtcgccaggagtaatatctaacaaaacgcgctcggtttcgcgcatcattgaaatcgctaatacccatgagccttgctaatcatgaatatgctggaaaaagtccagtctcaactggaacatttaagcaaatctgaacgaaaagtcgccgatgttattctggccgccccaggcagatcgattcacttaagcattgccatgctggcccaggaagctaacgttagcgagccaacggtgaaccgtttctgtcgcagcatgaatacccgcggctttcctgattttaaactgcatctggcgcaaagtctggcaaatggcaccccctatgttaatcgcaatgtggatgaagatgacagcgtcgaggcctatacagggaaaatcttcgagtccgctatggccagtctcgaccatgttcgccagtcgctggataaatcggccgtcaaccgcgccgtcgatttactgacccaggcaaaaaaaatcgccttttttggtcttggttcctccgccgcggtcgcgcatgacgccatgaataagttttttcgcttcaatgtaccggtgatttactccgacgatatcgtgctgcaacggatgagctgtatgaattgtagcgatgatgacgtcgtcgtgctcatttcgcatactggcagaaccaagagcctggtggaactggcgcagttggcgcgggaaaacgatgcgatggtgatcgccctgacctccgctggaacgccgctggcgcgcgaagccacgctggccattaccctcgacgtaccggaagatacagacatttatatgcccatggtctctcgacttgctcagctgaccgtgatagatgtgctggcaacgggatttactttgcgtcgcggggcaaaattcagagataacttgaagcgtgtcaaggaagcgctcaaggaatcgcgttttgataaagaattactcatcaagagtgatgaccgctaaaagcaataacaatgttctacccttttcgtcatccggggacgttcattttataccgttaaggtttcagaacgaccggatcaatgttcacgcaacaccaagttgttttagtcaacggagtattacatgtccagaaggcttcgcagaaccaaaatcgttaccacgttaggcccggcaactgaccgcgataacaaccttgagaaggttatcgccgcgggcgcaaacgtagtacgtatgaacttctctcacggctcgccggaagatcataaaatgcgtgctgataaagtccgtgagattgccgccaaactggggcgtcatgtggctattttaggcgacctgcaagggccaaaaattcgcgtttccacttttaaagaaggcaaagtgttcctcaacatcggggacaaatttctgttagacgctaacctgggtaaaggcgaaggcgacaaagaaaaagtcggcattgattacaaagggttgccggcagacgtcgttcctggcgatatcctgctgcttgacgatggtcgagtgcagttgaaagtgcttgaagtccagggcatgaaagtctttaccgaggtcaccgtcggcggcccgctgtctaacaataaaggcattaacaagctcggcggcgggctttctgctgaagcgctgaccgaaaaagacaaagccgatattcaaaccgctgcgctgataggtgttgactatctggccgtctccttcccgcgctgcggcgaagatctgaactatgcacgccgcctggcgcgcgacgccggctgcgacgcgaaaattgtggctaaggtcgaacgcgccgaagcggtatgcgaccaaaacgccatggacgatatcattctggcctctgacgttgtgatggtcgcacgtggcgatctgggcgttgaaatcggcgatccggagctggttggtatccagaaagcgctgattcgccgtgcgcgtcagctaaaccgcgcagtcatcaccgcaacgcaaatgatggagtcgatgatcaccaacccgatgccgacccgtgcggaagtgatggacgtggcgaacgccgtcctggatggcacggatgcggttatgctgtctgccgaaaccgcagccggtcagtatccttctgaaaccgttgccgcaatggcgcgcgtctgcctgggcgcagaaaaaatccccagcatcaatgtgtctaaacaccgtctcgacgtgcagttcgacaacgttgaagaagccattgccatgtctgcgatgtatgcggcaaaccatctgaaaggcgttaccgcgatcatcaccatgacggaatccggtcgtaccgcgctaatgacttcccgtatcagctccggcctgccgattttcgccatgtcgcgccatgaacgcacgctgaacctgaccgcgctctatcgcggagtaacgccggtgcattttgatagcgcggctgatggcgttgtcgcggcacatgaagctgttaatctgctgcgcgataaagggtatctggtttccggcgacctggttatcgtgacccagggcgatgtcatgagcaccgtcggttcaaccaataccacgcgtattttgaccgttgagtaaaactcccccacgcctgttcatcaggtagtacagggtttgtcagcataaagcctctcttacgagaggctttatttatttgatgggataaagatctttacgcttatacggctgaatctcgcctggcttgcgggttttgagcagcttcaggatccaggtgtactgttccggatgcgggccgacaaaaatttcgacctcttcgttcatccgtctggcgatagtgtggtcgtcagccgtgagcagatcgtccattggcgggcgaatctggatagtcaggcgatgcgttttaccattatacaccgggaaaagcggtatcacgcgtgcgcggcacactttcatcagccgaccaattgcaggcagcgtcgctttgtatgtcgcaaagaaatcaacgaattcactatgctccgggccgtgatcctggtccggcaggtagtaaccccagtagccctgacgaacagactgaataaagggtttaatcccgtcattacgcgcatgcaaacgtccgccgaaacgccgacgcactgtgttccagatatagtcaaaaaccggattaccctgattatgaaacatcgccgccattttttgcccctgagaggccatcagcatggctggaatgtcgacgccccagccatgcggtacgagaaaaatgactttttcgtcgttacgacgcatctcctcgataatctccagaccttcccagtcaacacgctgttgaatttttttcggaccgcgcatcgccaactcagccatcatcgccattgcctgtggcgcggtggcgaacatctcatcgacaatcgcttcgcgctcagcttcgctacgctgcggaaagcacaacgacagattaattagcgcccggcgacgagaactcttccccagccgtccggcaaaacgccccagcgtcgccagcaaagggtcgcggaatgatgccggtgttaatgcgatccccgccattgccgccgcgcccaaccaggcgccccaatactgtggatagcgaaaggatttttcgaattcagggatatactcactattattttttttggtttccatgcttttccagggtctgctgacgcgaaaaggaattgtgaatagtgtagcgacgtctgcgtctcacacaaaacaaaaaagccggcacacatcgcgtaccggctctgtcagcgcatttgttaatcgaagcgcagttgcggcagaacctctttcacctgtgccaggtattcacgacgatctgaccccgtcagaccttccgtgcgcggcaattttgctgtcagagggttaacggcttgctggttgatccatacctcataatgcagatgcggccctgtggaacgcccggtgttaccagaaagcgcaatacgatcgccacgtttcactttttgccccggtttcaccagcagcttacgcaagtgcatgtaacgtgtggtgtaggtgcgtccatgacgaatcgcaatgtagtaaccggcagcgccgctacgtttagcgaccacgacctcgccatcccccaccgacagcaccggcgtaccctgcggcatcgcaaagtcaacgccacgatgcggcgcaacgcgtccggtaaccgggttcagacgacgcggattgaagttggaggagatgcggaactgtttagcggtcgggaagcgtaaaaagcctttcgccagaccaaccccattacggtcatagaatttaccgtcagcggcgcgaatggcgtagtaatctttaccatcggaacgcatccgcacgcccaacaactgactctgttcacgcttgccatccagcatctcgcgcgacatcagaaccgaaaattcatcgccctttttcagcttgcgaaaatccatctgccactgcatggcttttatcactgcgctgatttcgctgctggttaaaccggcctctttcgcgctggcgacaaagctaccccctaccgtacctttcagcagactgttgacccagtccccctgctgcatttcactgctcattttaaaaccgttggcagtgcgatcgtaggtacgcgtttcacggcgggagacttcccatgtcagacgctgtaaatcgccatcagcggtcagtgtccaggaaagctgttggccaattttcagattgcgcagctccttatcagaagcggcaagtcggctaatatcgctcatatcgatgccgtactgattcagaatgctgcttaacgtatcgcctgtggagacgacgtattcatggacgccgacttcgcctgcggttttatcgtccagctcatcctgaggaatagcttcatcttcctgcgcggcctgatcgatgggttcgctggcctccggtaagagggaacgaatctcgcttttctccagttcaatagttttaacgattggcgcggattctgggtggtaaacatagggccgccatacggcgacggccagtgtcagaacggtaagtgaccccagcataacgcggtggggtcggggcagattattaaatgccagggcgacagagcgggctatctgttgcacgtattcacttcctcgttaatctcctttcaggcagctcgcatactggttggctaattggcttaaaaacgctgaatagcttgttttacccagtttaatgttcgtcccgagggggtccagtgttcccattcgaacggatgtccctctcgccacggcttccacgaccgctggcctgaattgtggctcagcaaaaacgcaggttgctttttgctcaaccaactgtgttcttatttcatgtaaacgctgcgcgccaggttgtatctcagggttcacggtaaagtgaccgagcggggtgagtccgtagtgtttttcgtagtaaccgtaggcgtcatgaaaaacgaaataccctttccccttgagcggcgcgagctcgttaccgacctgtttatcggttgcggctaattgtgcctcaaaatccttcaggttggcgtcgagtttggctcgactttgcggcataagttccactaatttttcatggattgcaaccgctgtagcccgcgctatctctggggagagccaaagatgcatgttatattcgccgtgatggtgatgtacgtcacctttttcctcatcggcgcccgtatgcgcatgttcatcctcatcatcatccgcgcccttcatgagtaacggttttacatcggcaagttgcgcaatggtaacctgcttattatcagggatattcctgaccgacttctccataaaggcttccatttccgggccaacccagacgactaagtccgcgccctgtaagcgttttacgtctgatggacgcaatgaataatcatgctcggaagccccatccggaagtaatacttgcgtatccgtaacgccatcagcaatggcggaagcgatgaacccaagcggtttaagcgaagcgacaacggcggcgtcggcagcctgggttgcactcccccaaagcgcggcggataatgctgcgaaaagaagcgtatttttctgtaacataatgcgactaatcatcgtaatgaatgtgtgaaatgtgatattataacattctatcacttctgcaagcctaaaattaacatgacaagtttagtttcactggaaaacgtctcggtctcatttggtcaacgccgcgtcctctctgacgtgtcgcttgaattgagccccggaaaaattttaacgcttctcggccctaacggcgcggggaagtcaacgcttgtacgcgtggttttaggactggtagcccctgatgaaggggtgatcaagcacaacgggcaactccgtatcggctatgtcccgcaaaagctctatctcgataccacgcttccgctgacggtaaaccgatttttacgtttacgtcccggcacgcaaaaaacggatattctcccggcgcttaaacgcgttcaggccggacatttgattgacgcgcccatgcaaaaactctccggcggtgagacacagcgcgtactgctggcgcgtgctctgcttaacaggcctcagttgctggtacttgatgagccgacgcaaggcgtggatgtcaacggccaggtcgcgttatacgaccttatcgatcagctgcgtcgcgaactcgattgcgccgtgctgatggtgtcacatgacctacatctggtcatggcaaagacggatgaagtgttatgcctgaaccatcatatttgctgttccggcgcgccggaagtggtgtctatgcatccggaatttatctctatgtttggcccgcgaggcgcggagcaattagggatttatcgccatcatcataatcatcgccacgatttacagggtcgtattgtactgcgccggggaaatggtcactcatgattgaattattactgcccggctggctggccgggatgatgctggcctgcgccgctggtcctttgggctcatttgtggtctggcgtcggatgtcctattttggcgatacgctggctcacgcgtcgcttctgggcgtggcgtttggcctgttgctggacgttaaccccttttatgcggtaatcgccgttacgctgctgctggccgccggtctggtatggctggagaaacgccctcacctcgcgattgataccttactgggcattatggcgcacagcgccttatctttaggactggtcgtggtcagcctgatgtccaacgtccgcgttgatttaatggcttatctgtttggcgatttgctggccgtcacgccggaagatcttatctcgatcgctattggggtcgttattgtgctggccattctcttctggcagtggcgcaacttgctgtcaatgactatcagtccggatcttgcctttgtcgatggcgtgaagttacagcgcgtgaagctgctattgatgctggtaacggcgttaactattggcgtggcgatgaagtttgtcggagcgctgatcattacgtcgctgctgattatccccgccgcaaccgcgcgtcgctttgcccgtacgccggagcagatggcgggcgtcgccgttggtgtaggtatgatagcggttacaggtggactgaccttctcagccttttatgataccccggcagggccatccgtagtgctgtgtgccgcgctgctgtttatcttcagtatgatgaaaaagcaggcaagctaagcgtgtgttgcccggtggcgctgcgcttaccgggcctacaaaatcgcccaggtctgatgagcgcagcgacttcaggcgctaaggcatctctggcggcgtgatcccgaaatggttccaggcgcgcaccgttgccatacgcccacgcggcgtacgctgcaaaaagccttgctgaatcagatacggctccagcacatcctcaatggtttcacgctcttcgccaatcgccgccgccaggttatccagtcccaccggaccaccgaagaatttatcaataaccgccagcagcagcttgcgatccatatagtcaaacccttccgcatcgacgttcagcatatccagcgcctgcgcggcaatttccgctgaaatagccccgtcatgcttcacctcagcaaaatcacgcacacgtctgagcagacggttggctatacgcggcgtaccgcgcgcccgacgcgccacttccagcgcgccgtcatcgctcatctcaagccccatgtgccttgcgctgcgcccaacgatgtgctgcagatcgggcacctggtagaactccaggcgctgcacaataccaaaacggtcacgtagcggggacgttaacgacccggcgcgcgtcgtcgcgccaatgagcgtaaacggcggcagatcgatcttaattgaacgtgcggcaggcccttcgccaatcataatatccaactggtaatcttccatcgccggatagagtacctcttccaccaccggtgaaagccggtgaatctcatcaataaacagcacatcatgcggttcaagattggtgagcatagccgccagatcgcctgctttttccagcaccgggccggacgtggttcggagattgacgcccatttcattggcaacgatattcgccagagtcgttttacctaaccctggcgggccgaaaatcagcaagtgatctagtgcgtcgccacgccgttttgccgcctgaataaagatctccatctgggagcgcacctgcggttggccgacatattccgccaataacttcgggcgaatggcgcgatcggcgacgtcttctgcgatcgtggcgcctgctgaaatcaggcgatctgcttctatcatcctttacctcataacgcggcgcgtaacgcgtcgcgaatcagtgtttcactgcttgcatccggacgggcgatcttgcttaccatccgactggcttcttgcggtttataacccagcgccaccagcgcagcaactgcttcttgttctgcatcttccgaggttgggctggccggcgacgtcaataccagatcgaccgctggcgtaaagagatcgccatgtagccctttaaagcggtctttcatttcgacaatcaatcgttcggcagttttcttgccgatacccggcagcttcaccagcgcaccaagctcttcgcgctcaaccgcattgacgaactgttgcgccgacatgccggagaggatcgccagcgccagcttaggcccgacgccattcgttttaattagctctttaaatagcgtgcgctcttgcttattgttaaatccgtacagcaactgcgcatcttcacgcaccacgaagtgggtgaagacgattgcctcctgcccggcctccggcagctcgtaaaagcaggtcataggcatatgtacttcatagcctacgccccctgtctccagcagcacgatcgggggttgtttttcgagaataatgcctctgagtctgcctatcacatgacgctcctgcgtaaagggctgaaaagataatgcactatcataaaaaaagactggatgtttatccagatgaaaaacacgttattcgcctatctcaatggccttcccttcgaatcggtcgcgcaacaccaccgggtgccgccgcgccccatgatgtggagatataataagtgtctataataaatataattcaataacattttctgtaagaataataaataaaaagtccagatacgcattatcactatagcttgaatttcctccggtgaaagcacatcctttataaacatttttaatcatcttgttatttaatcattcaggacagaaattcaatgttattgaaaaatattgtcataggtgcattaatggctattcctgcgctggcgtcagctaatagcctcacggaaacacgggaaagaatggccattgagcaacaagctatcgcctatactgtcagccaaaagtgggacaagctggacgctatgtttcaggaatacaataccggattcccgacaaccagcggcggaactcataaactggttatcgcatggggagggatctataatctttttcagtagatgtttccgacaatggtatttctggcgtggcaaaagagtggcttaaagcaaaccccaaatccacgggtgcaaggctgctgcaagcaatggtttttgatgctaaagccgtgaatttacgcggtgaaggtgcggccagcacggtggactctgatatatggccgaaatataaaaagctgatgattcaggaaaaagagtatctgttaaagaacaaagatattgccgacaaagatgtgacctggtatcaggaaatggaaatggtcgcacgcaatcttgaggataaagagctgctctatagcactttggaagaagccagcaaaaaatatcccgcctatcaaaatatttatatcgaggccatggttgctcgtttgcctaaatggggtggttctccggaagaagtcgaaaaaatcgccagaatggccgcagaaaaaaacaaagatcaatcgggactttcttactacgcttatatctggagtaatgcaatccattaccaacctgaattaatggctttactgaataaacgtcagattgtctcctgggacgatatgctgcaaggttggagagatcgctacaaacagttcccatcaacccgcacgcttaataatattctgataagctcctgcattgcccgcgataaagactcctttgtgaaagcagataaaatgattcaaggggaaacggagcgggatacctggccacaagggttaaattatcgggaatgccagcagtccttccaataattgccagattaccatcacagtttaatgcacagcattaattgaattaagccgcctctgccgttatatgcagaggtggtttaatgggaaatgtccttcaacctctggaccatgaacgagataaacggtaccgttgttaatcacttccttaccctttacaagaataataatcagcgattgatgaacagtacagactcgatatttttttgcattgcaacctaaccttttgcactttcgcctcctgttccccctggcgcttaatataacgcagagtcagccaaatatttgcgccaaccactcttgccagatcacacctcaaatgcctattaaaaacaaaagcaataagcatgaagagaaacacaaccagacaataacatagactcaaaaaaatatatggcgatacaaacaattatataatattgaaaggacagtccacttattccctgcgttcgtctatcttccctttcactttcacctctggaaagagataaaaacattatcaccgtaaattataatattcatgatggatatttattgataataatatcttgtcattatgtgagtataatgctaattatccaatagcgtaaaataaaggatattattttaggtaataatggaacgtgaacatgaaaaaacattattctgtccaatatgaaaccggggatatcgtctttacctgtataggtgccgcgcttttcggccagatatccaccgcttcacagtgctggagcaaccatgttgggattattattggtcataatggtgatgactatctggtggcggaaagtcgcgtccccctctcaaccgtcaccacgctgtcactgtttatacaacgttcagccggacaacgttacgcggttcgtcgcctgtgcggcggcctgacggtcgaacagaaactcgccatcatggaacaggttcccgcccggctgaataagttttatcacacggggtttaaatatgagtcatcgcgccagttctgctcgaaatttgtgtttgatatctataaagaagcattgtgtattccggtaggcgatattgagacattcgaagaattgcttcacagcaatcctgatgcgaaactcgccttctggaagttctggtttttaggttcaatcccgtgggatcgtaagacggtgacgcccgccagcctgtggcatcatcccaatttagaattaattagcgcctgtggaattgaaacccctcaacgcgaggctgagggagaatgatttagcgcaaccttccccgcgccagattgagtcggctctcgctcatttgcatcgcgttctggctaacatggcaatgcgtaatggcgatagccagcgcatccgcggcatcggcctgcgggttagcggggagctttagcaacgtacgaaccatatgctgtacctggcttttttccgcgctaccaataccgacgacggtttgcttcacctgacgcgccgcgtattcaaacacgggcagttcctgattgaccgcggcgacaatcgcgacgccgcgcgcctgtcccagcttgagggctgaatcggcgttcttcgccataaacacttgttcgatagcaaaatagtccggctggaactgcgtgatgatttccgtcacgcctgcgtatatgagcttcaaacgagacggcaaatcatcgactttggtgcgaatacatccgctgcccagataggtcagttgtctgcctacctggcggataacgccataaccggtaatgcgcgagccggggtcaataccgagaataatcgacacgctataccccctgcccgccggcgtttaacagcaccattacagggtcgccgccacctcatcagagatctcaccgttatggtagacttcctggacatcgtcacagtcttccagcatatcgatcagacgtagcagtttcggcgcggtttccgcatccatatccgctttggttgacgggatcatggacacttcggcgctgtccgctttcagacccgccgcttccagcgcgtcacgcactttgcccatctcttcccaggcagtgtaaacatcaatcgcgccatcatcataggtcacaacatcttccgcgccagcttccagagcagcttccatgatggtgtcttcatcgcctttctcaaaggagatgacccctttcttactgaacaggtacgccactgagccatcggtacccagattaccaccgcacttgctgaaagcatgacgcacttccgctacggtacggttacggttgtcactcagacactcaatcataatggccgtgccgccaggaccataaccttcatagatgatggtttccatgttcgagtcttcatcaccacccacaccgcgagcgatggcacggttcagagtgtcgcgggtcatgttattggccagcgctttatctacagccgcgcgcagacgcgggttggcatccggatcgccgccgcccaatttagctgccgttaccagttcacgaataattttagtgaagattttaccgcgcttggcatcctgcgcagctttacgatgtctggtgttggcccatttactatgacctgccataaatatttcctcaaaaaaagcgcgccttttcaggcgacgttaatgacaaactcttcaatcgcttgccggttactccaggacttggtaagcgccgccgcgtcaggcgcatcaagccactggtacgtcagatgttcagtgaatatcacctgccgctcatgcggtaacgcaaggcagaaccagaattctgtattgtgcataacgcccggcgcatagcgatgacgtaaatgtgaaaaaatttcaaactccaccgtacgttggcagtcgattaaggtcagttgctctgccgcaacatcaatcgtgacctcctctttgacttcacgcacggcggcctgcaacgcggtctccccttcttctatgctgccagtcactgactgccaaaaatccgggtcgtcgcgtcgctgcaacattagcacccgtttcgtatcctgcgcgaaaataaccaccaggaccgaaacggggcgcttgtacactttatccttcacgcgacctcgttgttggctgttgggtgacgccgcgcattgatgaggctcccccttgcgggccgccgcgatatcacgcgaatgatgtcgtgtacattgttcatatcagttattctcggctttcttcacaacctgaatacccaactccgtcaacgctgccaggttggcgaaactcggcgcttcggtcatcagacacgcggcggcggtcgttttcgggaaggcgataacatcacgaatattgtcggtgccggtcaacagcatggtcagacggtccagaccaaacgccaggcccgcgtgcggcggcgtaccgtatttcaacgcatccaacaggaagccgaacttctcgcgctgctcctgctcattgataccgagaataccaaatacggtttgctgcatttcaccgttgtgaatacgcaccgaaccgccgcccacttcatagccgttaatcaccatatcgtaagcgttagcgacggctccttccggcgcagttttcagttcagacgccgtcatgtcacgcggggcggtgaacggatggtgcatcgcggtcagaccgccttcgccgtcgtcttcgaacatcgggaagtcaatcacccacagcggcgcccatttgtcttcgtcggtcaggctcaggtctttgcccagtttcagacgcagcgcgcccagcgcatcggcaaccactttgttgttatctgcgccgaagaagatcatgtcgccgtcctgcgcgccggtacgttcaaggatagcctcgacgatgtcggcggtcaggaacttggccaccggactgttaatcccgtccagacctttcgcgcgctcgttaactttgatatacgccagtcctttcgcgccgtagatcttaacaaagttaccgtaatcgtcgatctgcttacggctaagctgtgcgccgccaggcacacgcagcgctgccacgcggcctttcggatcgttagccgggcccgcgaagaccgcgaactctaccgatttcagcaggtcagcgacatctaccagttccatcgggttacgcaggtctggtttgtcggaaccgtaacgacgttccgcttcggcaaacgtcatgaccgggaaatcccccagatccacgcctttcacttccagccataaatggcgcaccagcgcttccatcacttcgcgcacctgtggcgcggtcatgaaggaggtctcgacgtcgatctgagtaaactccggctgacggtcagcacgtaagtcttcatcacggaagcatttgactatctgatagtaacggtcgaaaccggacatcatcaggagctgtttgaacagctgcggcgactgcggcagcgcgtagaatttacctttgtgcacgcgcgaaggcaccagatagtcgcgcgcgccttccggcgtggctttggtcagcatcggcgtttcaatatcaaggaaaccgtgatcgtccataaaacgacgcaccaggctggtaattttggcgcgggttttcaggcgctgcgccatttccggacgacgtaaatccagatagcggtacttgagacgcgcctcttcggtattaacgtggttagcgtcaagcggcagtgagtctgcgcggttgatgatagtgagagaggacgccagcacttcaatttcgccggtcgccatatccgcattgacgtttttcgcgtcacgcgcacgcacggtgcccgtaacctgaatgcagaactcattacgcagttcagaggccagctttaacgcgtccgcacgatccggatcgaagaacacctgcacaataccttcgcggtcgcgcatatcgataaagatcaggctgccaagatcacgacgacggttgacccaaccacacagagtcacctgctgccccacgtgggacagacgtagctgtccgcaatattctgtacgcatgagatatcccttaacttagccgcaggcggattgttgcctgccatgcaggcgacgaagtcgcagctttagctgtatgtcacaactggatgaaaaaaggcggctattatactggaaattctgccgcacgataagagtcaatccagcatgggagcgataacttgcccgtttcatgcggtatcgacacttggttcatactgactgtacccgggtttttcacgcgggtattgcgtatgctcacaaaaattaacaatatttgtcgccgctttcctctttaatcgcgcttaaggtgtagtgaaatccgctatttttaggagagtgattatcatgctgaaactcaacgcgaccacaaccgccctggtggttattgatttacaggaaggaattcttccgtttgccggcggcccgtatacggcaaatgaggtggtcgcccgcgccgcgcggctggcggaaaagtgtcgtgccaacggctcgcccgtggttatggtacgcgtcggatggtctgatgattatgccgaagcgttaaaacaacccgtggatgccgcaacgcctgcgcacgcgttgccggaaaactggtggacctggcctacggcattgggtaaaaaggacagcgatctggaagtgactaaacgccagtggggcgcgttttacggcaccgatctggaattacagcttcgccgccggggtatcgacaccatcatattgtgcgggatctcaaccaatatcggcgtcgaatccacagcgcgtaacgcctgggagttggggtttaaccttattattgccgaagatgcctgtagcgccgccagcagtgagcagcatcagagcagtatgacacatattttcccgcgcattggccgggtacgcagcgtagaggatattttaaacgccttatgatctacattggcttgccgcaatggtcgcacccgaaatgggcgcggctcggcatcaccagtctggaagagtatgcccgccactttaactgcgtggagggcaacaccacgctttacgcgctgccgaaagcggaaattgtcgatcgctggtatgcgcaaactacggacgatttccgtttttgctttaaatttcccgccaccatttctcaccaggccgcgctgcgccattgcgacgatctggtacaggcgttttttacccgcctggcgccgctggaaacgcgtattggccaatactggctgcagttgcccgccgcctttggaccgcgcgatctccccgccttatggcagtttcttgatgcgctccccgccacgtttacctatggcgtagaagttcgtcatccgtgtttttttgacaaaggtgaggatgaacagcggctcaatcgcgggttacacgcgcgcggcgtaaaccgcgtgatcctggatagtcgtccggtacatgccgcccatccccacagcgaggccgtccgcgacgcgcagcgaaaaaaacccaaagttccggtacatgctgtcgtgacggccagccatccaatggtgcgttttatcggtagcgataatatggcgcaaaaccgtgaatttttcgccgcctggttgcagaaactcccgcagtggcggcagaccaccacgccttttctgtttttacatactccggatatcgcgcaggcgccggaactggtgaatacgctttggcatgatttacgcagcgtcttaccggaaatcggcactgctccgtccattccacagcaatcttctcttttctgaaaatgccccctatcatagacagtgccatcagccattttaaaagggagtttgtatggtaagcgcgctgtatgccgttttgggtgcgttattattaatgaagttctcttttaatgtcgttcgcttgcgaatgcagtaccgtgtcgcctatggcgacggcggttttagcgaattgcaaagcgccatccgtattcatggcaacgcggtggaatatattcctgtcgcgctggtgctgctgctgtttatggaaatgaacggcgccgaaacgtggatggtgcatatctgcggcatcattttaatcgccggtcggctgatgcattattacggttttcaccaccgcctgttccgctggcggcgggcggggatgagcgcgacctggtgcgcattgttgctgatggtgctggcaaacctgtggtatatgccctgggagttggttttctccctgtattagcgcacaatatgcgcctttatttttcccggatgtatacgttatgtctcaccgcgacacgcttttttctgcgcctatcgcccgtctcggcgactggacttttgatgaacgagtagccgaagttttccccgacatgattcagcgttcggtaccaggctactccaacatcatctccatgatcggcatgttagctgaacgctttgtgcagccgaacacgcaggtctacgatctgggctgctcgctgggcgccgcgacgctgtctgttcggcgtaatatccgccatgagcattgtcgcattatcgccgtcgataactccccggccatgattgaacgctgccgccgtcatattgatgcgtataaagcgcctacgccggttgaagtcgttgaaggcgatatccgcgatatcactattgaaaacgcctcgatggtggtgctgaattttaccctgcaattccttgaacctgccgaacgccaggcattgctggataagatttacctggggttgaatcccggcggcgcgctggtactgtcggaaaaatttagctttgaagacgcgaaagtgggcgagctgttattcaacatgcaccacgattttaaacgcgctaatgggtacagcgaactggagatcagccagaagcgcagtatgctggaaaacgtgatgctcaccgactcggtggaaacacataaagcgcgcctgcgtcaggcgggtttcgaacacagtgaactgtggttccagtgctttaatttcgggtcgcttgtcgcgttaaaagccggagttgccgcatgatcgagtttggtaacttttatcagctcattgctaaaaatcatctctcccactggctggaaacattgcccgcgcagattgcctcctggcaacgcgagcagcagcatggcttgtttaaacagtggtcgaacgcggtagaatttttaccggaaatgacgccctggcggctggatttactgcacagcgtcacggcggaaagcgaaacgccgctcagcgaaggtcagctaaagcgtattgatacattgctgcgtaatctgatgccgtggcgtaaaggcccgttctcgctttatggcgtagatattgacaccgaatggcgctccgactggaagtgggatcgcgtactgccgcatctgtcagatttaactggccggacgatccttgatgtcggctgcggcagcggctatcacctgtggcggatgattggcgcgggcgcacatctggcggtcggcatcgatcctacgcagcttttcctctgccagtttgaggcggtgcgtaaactgttgggtaacgatcagcgcgcgcatctgctgccgttgggcattgaacaactcccggcgctgaaagcatttgataccgtcttctcgatgggggtgctttatcaccgtcgctcgccgctggagcatctgtggcagttaaaagatcagttggtcaacgagggtgagctggtactggaaacgctggtcatcgacggcgacgaaaataccgtactggtgccgggtgaccgctacgcgcagatgcgtaacgtctattttattccttccgcgccggcattaaaaaaatggctggaaaaatgcggctttattgatgtgcgtatcgctgacgtttgcgtcactaccaccgaagagcagcgccgtaccgaatggatggttaccgagtcgctggccgattttcttgacccgaacgatcgcagcaagacggtggaaggctatcccgccccgcagcgcgcggtgctgattgcgcgtaaaccgtgatggattgccgaatgaccgttacgtatagcaccgtttctccaaaatagttcaagttgcagcaaggcggcaacgcagcaaatccccgggaacgtaggtagctacgtggccggggtgcgcgaggcggccaacgctgctgcggcttgaaatatgaaggagaaaaaaaggcccctgttgaattggcaggggcctggtacgagcaagcatcatattgggcgacatgatgcaacggtaaaaatcatttggcctgatggcgaacaatgattcctttcatttcagcgaccgccgcaccctctactctatagcgagaatactcgtccgcctgtatatcggcagacatcgataacccctgattgcgatagcgcatcggcgaaggcagtaagactccggcggaactgtgtacttcccgtactccggcatcgaggaaattctgcaggttatttgcacgaacccccgcaccagccataatggttggagcatccccctgggcaataagttccataattattgataaaccttgcgccgcatcggctttttgtccggaagtcagtactcttgctacgcctgcgtcagccagattctttagcgcattgaagggattagcgcacatatcgaaggcgcggtggaatgtcaccgccagcggcccggccgccgccattattttttccattcgcgacatatcgacatccccatcaacggtcaacacgccagtaaccagcccgggaaaacccaactctctgacgaggcggatatcttccagcatggcggcaaattcgccgtcagtgtagtaaaaatccccgccgcgaggacgaataatcggatgtacgggaatcgtaatatgctcgcgtacgctgcgtaagacgccgaaagaaggcgtaagccccccttctttcggcgcggcgcacagttcgatacgatccgcgccgtttcgctgcgcggtgagcgcgcattccatgctgtaacaacagatctcaagtaacgccatattcactccgctcggcaggttaatgggccgcctgttcgctggcgacaatcgcttcaatcgaccatggatgaaattttaccgtgatgcgaccatcggtcacggccagcgtagggtttggcaaacgttcatgctcgccctgtggcgaactggttttaaccactatccccggctgactaagcccctcatccgacaacaacgccagggccctcgcgttcaaggtctccggctcgccgggcagcacgatttcaatatgctcccacccctcgtgtggatagcgtttttctcccggccacggtaattcaataacagaaaaccgccagtgttccacacataccggttcatgcagtttaaacagacaaatcggcctgccgttgatgatattttccgacagtagctcgccgcattgttcaaaaccgcgacgccaacgctccgccgtcgtattctggtgacagcgcaatgaaatgtgatcggcctcaagggcgctaatctgcagaccaaggcgagtggaaagttctctgaacgccagagtgaatcgcggtaaatctgcggaaatatcatgcagttcatcaatgtgttgccagttcgccatatcaggacgctcttcttgctgtgaaaaccgctaatttacgctgttgcgccccggcaaccaacctttgatttgattgggcgtttattgaatgcttatgcagattattgttgcgtatatttcaggcgacgcgccgcgcgcgcaatgctgacgccaacgggcatttgcagtatactcccgccctaattcttaaactggcgcgggcaatacagcccgcttcataaacgtaaggtattccggtgaatattcaggctcttctctcagaaaaagttagtcaggccatgattgctgcaggcgcgcctgcagattgcgagccccaggttcgtcagtcagccaaagttcagttcggcgactatcaggccaacggcatgatggcagttgcgaaaaaactgggtatggccccccgacaacttgcagagcaggtgctgactcatctggatctcagcggcatcgccagcaaggttgaaatcgccggccctggctttatcaatattttcctcgaaccggcttttctcgctgaacaggtgcaacaggcgctggcctccgatcgtctgggcgtttctcagccgactcgtcagacgattgtcgtcgactactccgcgcccaacgtcgcgaaagagatgcacgttggtcatctacgctccacgattatcggcgatgcggcagtgcgcacgctggagtttctgggccatcatgttattcgcgctaaccacgtcggcgactggggcacccagttcggtatgcttatcgcctggctggaaaaacagcagcaggaaaacgcgggcgacatggcgctggcggatctcgaaggattctaccgcgatgcgaaaaagcattatgacgaagatgaagcgtttgccgagcgcgcgcgtaactacgtcgtcaaattgcagagcggtgatacctatttccgtgagatgtggcgtaagctggttgatatcacgatgacgcaaaaccagatcacctatgatcgtctgaacgtcactctgacgcgtgacgatgtgatgggcgaaagtctgtataatccgatgctgccgggcatcgtcgccgatctgaaagccaaaggactggcggttgaaagcgaaggcgcaacggtggttttccttgatgagtttaaaaacaaggaaggcgacccgatgggcgtcattattcagaagaaagatggcggttatctgtataccactaccgatatcgcctgcgccaaataccgttacgaaacgctgcacgccgaccgcgtgctctactacattgactcccgtcagcaccagcacctgatgcaggcctggaccattgtgcgtaaagccggttatgtgccggattccgttccgctggaacaccacatgttcggcatgatgttgggtaaagacggtaaaccgtttaaaactcgcgcgggcggtacggtgaaactggcggacctgctggatgaggcgctggagcgcgcgcgtcgtctggtggcggagaagaacccggatatgccggctgacgagctggaaaaactggctaacgccgtcggtattggcgcggtgaaatacgccgatctgtcaaaaaaccgcaccactgactatatcttcgactgggataatatgttggctttcgaaggcaataccgcaccttatatgcagtatgcctatacgcgtgtgctgtctgttttccgtaaagcgaacatcgacgagcaggcgctggcgagcgcgccggttatcattagcgaagatcgcgaagcgcagcttgctgcccgtctgctgcagtttgaagaaaccctgacggtggtcgcgcgtgaaggtacgccgcacgtcatgtgcgcatatctgtatgacgtcgccgggctgttctccggcttctacgagcactgccctattctcagcgccgagaatgacgcggttcgcaatagccgcctaaaactggcgcaactgacggcgaagacgctgaaactgggtctggatacgttgggtatcgaaaccgtagaacgcatgtaaacgcgccgtcgttaacatcatcaggcctgactccggataacggactcaggcctttttattgccacagcggtatatctgtaacaaatcacaaggaatgacacatttctatagagagatggaacatcttttacctgtgctggcgctgaccgccccgtatcattaggcggcggattgttcaggtacaggtaatgacttttaaagactttgatgcggaagagaaactcttcctgagacgtgtgattgtggcgtttggtgtagtggttgtctgctttggtatcctgatcttcaacctctataacttgcaaatccgccagcaccactactacaccacccgttcgaatgagaacgatatcaagatgctacccgtcgcgcccacgcgcggcatcatttacgatcgcaacggcattccgctggtgcgtaacgtaacctggtatgatatcgcggttacgccctataaaattgccgatatggatgcgctgctaaaacagctcacccctattgttgatctctcccccgacgatatctccgactttcgccgtgcgctaaaatccagtagccgctatcgtccggtggtgctcaaaaacgcgctaacggatgttgaaatcgcacgctttgcggtcaatcagtttcatttcaacggcgtcacgatcaatagctatcaggatcggcagtatccttacggcgcggagctggcgcatgttctcggttacgtgtcaaagataaacgataacgaccttaaagcgctggataaaaaagggctggcagagaattacgcggcggaccataacatcggtaaacaggggattgagcgttactacgaaaacgatcttcatggtaaaaccggttatcaggaggtcgaggtggataatcacgggcgtattgtccgcctgctgaaagacgttcctcccatcgcgggtaagaacattcacctgacgctggatctccatttacaagagtacattgaaagtttgctggccgggcagcgtgctgccgtactggttgaagatccgcacgatggttcagtgctggcgatggtatctatgcccagctacgacccgaacccctttgtaaaaggcattagctatcaggattacggcaaactgctgcacgataaaaatctgccgctgatcaaccgcgtgacgcaagggctttatcctccggcgtcaacggttaaaccctatatggcaatgtccgcgctgttatgcgggattattacgccgcaaaccaccttctttggcgcgccaacctggacgcttcccggcacgcagcggcattaccgggactggaaaaaaaccggacacggtatgctggatgtcactaaagcgattgaggaatctgcggatacctttttctatcaggtcgcttatatgatgggtattgaccgtatcgacacgatgttgtctcagttcggctatggcaaaccgacgggcatcgaccttaatgaagaatatgacgggctgcttcccagccgcgcatggaaacagcgggtccataaaaaagcctggtatcagggcgataccatttctgtcggcatcggccagggttactggattgccacccccatccagatggtaaaagcgatggtggcgctcatcaacaacggtaaggtgattgcccctcacctgttactcaatgaagagagcggcaaaacggtggttccgtatcgtccttcaggaacaccggcacagatagccgatccggcgtcgccatactggggactggtgcgtcaggcgatgtatggcatggcgaatgcacccaacggaacgggctataagttctttcacaccgcgccctacggcattgcggccaaaagcggcacgtcgcaggtatttagcctgaaagaaaatcagacctacaacgcgaaaatgatccccattcgcctgcgcgatcatgtgttttataccgcttttgcaccgtataaaaaccctaaggtcgctattgccttgattctggaaaacggcggaagcgacggcgttaccgccgcacccatcatgcgaaaaatccttgaccacctgtttgatccacaggctgataccacacagccggatcaggcgccatagtcaaataagcaaagcgccatcagacaaggatacggccggaatatctgcatacatcagaaatagttacgcagatattccgtcaaacacagcattgccatcgcctgcccgtaaggcatagaggtcaacggaatatgacggtaaaaatcgagatcgtggcccatgccagtgccaaatgacgtttgcagcagttcaccttccggcgagatatgtttcactatcccccgaatagctttttccgccacctgcgcatagtgccgttcgacatagcgtttgcgcaccgctttaagaataccgtaggcaaaacccgccgtcgccgacgcctcaagataagagtgcggatcgtcaagcagcgtatgccacaaaccgctttcatcctgacatttcgccagcgcggcgatctgcgcattcagtacctggaccagataacggcgcacggcattattttccggcaagtccagcagttcaagaaaatccgggatcacaatggtcagccagctgttgccgcgcgcccagcgagcgttagcgaagttatgatgaccgtcatagctccagccgtggaaccacagccccgtctctttatccatcaaattctgcacgtgcagcaggaactgataggttgcctcttccacgtattccggccggttcaacagtttaccgattttcgccagcggcagcaccgtcatcattagcgtgtcgtcccacatctgctgatgattttcctccgccagcgtgatgtgctgcattccgccgtgatcggtacggggcatttcattcatcgcccattcggcccacgtttccagccacggtaaatacgctggattacgcgtctcttcatagcgatacgccagcgttaaaaacggcgccatcgtattaacgtttttcgtcgtcgcgccttccgcaaaacgatcggcaaaccagtcatcaatgatcttacgcatcgtctggtcgccggtctgttggtaatagtgatacattccgtacaggcccacgccgtgcgtccactcccatccggcccagcctttagtatcgatcacgcgtccgtcgtccagtcgcaataaaaattcgcctgtctcatctttaatattgaccaggttatgcgtcaccttttgcaccagggcttttagttcatctctggcgataaaatgctcaggctgacgcaatagcggactgtgtttgactggataaaccatcatttgcttaacctctgtgtaatgtcgaattcagtgctgcgtgcagttttaccgccgacgcagtcgattcgctacagtaaaagctaagctgggcggaaacctttttgtttctgccattgccagagcgtaaatggcaaaaacgcaaagagtccggcaacctacctcaccattttataaaacagcgtttctatttattcaaaaagagagtcaggtctgctacctggcaaagaaaggggcggttagcggtagttcacaatcacctgattgctccgcacttttaacgccgggataagtcggccgccgccggggacttcccagacaaagcggagcggctcgactgcgggaacatgagcaaaaccgtgggtcgtgccactctgaccatcaagttctacgcaacgggactgggaacataaacgtacccgtaagcccgcgggagtcgggccattcagttcataacgccaggcgaccagcgtcatcacaccggaaaccggctggcgcgccgacaatggcgaagacgatgcggaaacaccccggtaatttaaggttacacccataccgctatcctgccacgcgccttcgcctgcggcctgaaccgtcaggggaaagagcaacaacgccagccatttacgcattattttcctccaatggtcgccgtcatgcggatatgacggttatcggaaagctcaaggttcgacaacaccaccagctgcggtaaactgcgccgcaaaaagcgggacaataatggacgtagcgcatggttaaccagtaataccggcggcgcgccaagcatttcctggcgagaaagcgcttcttgggtctgcgccagcaggcgatccgccaacccaggctcaagtccaccgccgccctgcaatgcctgaagcagcaaacgctccagcgcggtatccaggccaatcacctgcacttcttcattaccggggaaccactgttgcgtaatcgctcgtcctaatgccacgcgtaccacggcggttaattcatgcggatcgctttgtaacggcgcatgttccgccagcgtttccaaaatggtgcgcatatcgcgaatcgggactttttccgccagtaagttttgcaggactttgtgtaaagtcgtgagggtcacgacgccggggaccagatcttccgtgagtttaggcatctcctgagagacacgatccaacagttgctgcgcttcctggcggccaaacagttcggcggagaattggccaatcaagtggttaaggtgcgtcgccacaacggtactggcttccacgacggtaaagccctgaatttgcgcctgctctttcagggcgctttcaatccagatggcatcaaggccaaaagctggatcgacggttttctcgcccggtagcgttcccgccgccgtgccggggttaatagccagccagcgtcccggataggcgtccccgctgccaatctctacccctttcatcaaaatacggtagcgcgcaggctgtaaatccatattgtcgcgaatgtggaccaccggcggcaggaaccccatatcctgcgcgaattttttacgaatactgcgaatacgtccgagcaattcgccatcctgttgaaaatccaccatcgggatcaggcggtagcccacttccattcccagtgaatcctcaagctgtacgtcattccaggtggcttcgaccaccgagttattttccggcatttttaccggctgcggctcctccggcgctttttcttcacgcccgcgcagccaccatgccaggccgagcaaagcggcggtaaaaagtaaaaataccaggttaggcattcctggcaccatgccaagcagccccagcaccgccgccgccagcagcatcacccttggattactgaacagttggccaaccatctgctcgccaacatcctgatcggtactaacgcgggtcacaatgacgcccgccgccgtggagataaccagcgccgggatctgggcgaccaggccgtcgccaatggtcagcagggtgtagctttccgccgcgctgcctatgctcattccgtgctgcaatacgccgaccagcagcccgccgaccacgttaatgaccatgatgagaataccggcgatggcgtcgccgcgtacaaatttacttgccccgtccatcgagccgtagaagtcggcttcctgagtgacttccgaacgccgttttttggcctcgtcttcaccaatcagaccggcattaagatcggcgtcaatcgccatttgcttaccgggcataccatccagcacaaagcgcgcgccgacttcggcaatacgtccggcgcctttggtgatgaccatgaagttgataatgacgaggatgataaaaaccacaatcccgatcgcgaagttaccgccgaccaggaaatgaccgaacgcctccactacctttcccgccgccgccgcgccggtatgcccttccatcaaaataatgcgcgttgaggcaacgttaagcgccagacgcagtagcgtggtaaacagcaggatggtcggaaacgcggcaaaatccagagtacgctgggtaaacatcgccaccagcagcaccataattgatagcgcaatattaaaggtaaacaataagtcgaggataaaagcaggtagcggcagcaccatcatcgacaaaatcagcagaatgaggatcggcccggcaagaatttgccattgcgtcgatttcaggttgctgggcaggcgcagcatcgcgaccagattagccatcagtattcttctcgttcataaaatccagcgcttctggcaccggaaggttctcaggttgtagaggacgttgcccgcccgcaagccgccagcgtttaagctgccagacccaggccaacacttccgcaacggcagcatataactgcccgggaatttgctgaccgatttcggcgtggcgatataatgcccgcgccagcggcggcgcttctaaagtgggaacccgatgttcagcgccgatctcgcgaatgcgcagcgctattaatccagcccccttcgcgaccactttcggcgcgctcattttgttttcgtcatactgcagcgccacggaatagtgcgtcgggttagtgacaatgacgtccgctttcggcacatcttccatcatgcggcgctgcgcggcggcgcgttgcatctggcgaattttgcccttaacatgcggatcgccttcgctctctttaaattcgtcgcgaatgtcctgccgcgacatgcgtaattttttcaggtggctaaagatctggaaaaacacgtcaaatcccaccatcggaatcacgcccagtaccaccagtaacgcgcagagtccaaccagatccagcgcattccccattgcgacgatcggcgactccgccatcaggcgcatcatttgcggccagtgatgccagagataaaagccggtaacgcagccgaccagcgtggatttcaacaccgcttttagcaattccgcgccggtctgcgccgaaaacatgcgcttaattcccggcagcgggtttaatttagaaaattttggctgtagcgacttaccgctaaaaatcaggccgccaagcataaccggcgagataagcgccaccagcaccacgcccgcgatgagcggtagcagtgccatcatcgccgctttaatcagcaaaattatctgccccaggatcaggttaggatcgatcaccatacggtgatcgaagtgcaggcctgctgagagcattcccgccagctgccgcgctaacgactcgccgccgaaccaaataatacaaacgcccaccagcaatatcagcagtgaggtcagttctctggaacgggggatctgcccttcttcccgcgctttttcaagtcggtggggtgtgggggcttctgttttgtcgtcgtcgctctcttctgccacgcagcaaaccctggatagattgataagagagaatgatgccagaaccgctttacgccaataggcagagtaagcggtaaaaaaggcggggtttatggcgttaatagagatagccggatacgataagaaagtctcgtatccggccgggttgacggattcgaacccgataagcgcagcgccatcaggtcaaaaaagcttaaaagccaagactgtccagcaggtcgtccacctgatcctgactggcaacgacgccagctttcgaggtatccacctgcgggccgttgagcaagctttcgttctcgcgttttggtcgcgcgctctgttccgggatgttttccagcagcaccattaacaactggcgttcaatctcctgaatcacgtccatcatgcgtttgatcacctgacccgtcagatcctggaaatcctgcgccatcatgatgtccagcagttgcgcgttagtaaagctggtatggcccgggacatccctgagaaactggcgcgtatccgtcaccagttcacgggcgtcggaaagctcgatcggattgtcaaaccactcgtcccaacgttgggttagcgctttcgcctctttttccatcgcatcctgatgcggctgcgaggcttcgacactgtttagcgcgcgttccgccgcctgcgccgtcatctggacgacataatccagacggtcgcgcgcatcagggatcgcctccgccgcttcggcaatcgcctggtccagccccagttcacgcaggctgtcgcgcagcattcgggtcagactaccgatgcgcgcaatgatgtctcctgctgagccttcatcagcaggcttgatagatggttgcatcatcatcgcatcctcacatgcccagtttctcaaagattttgttgagcttctcttccagagtcgctgcggtgaacggttttacgacataaccgctggcgccagcctgtgcggcggcgataatattctcttttttggcttccgccgtgaccatcaacacgggtaacgccgacatggcgctatcggcgcgaatggttttcagcagctccaggccatccatgttcggcatgttccagtcggagataataaaaccaaagccgcccgcctggagcttgttcagcgcatcgacgccgtcttcggcctcttccacattgttaaatccaagctcttttaagaggttgcgcacgatacgacgcatggtcgaaaagtcatccacaaccaaaaatttaagctctttatccgccataaaatactactcctggttcaaatacgtatcgcctgtccggcactgattttcgccaacatctgctggcttacctggctaagatcgaccacttcgcttacgccacccatattgatggcctcgcgcggcatgccgaacaccacacaacttgcttcgttttgcgcaatggtccaggcgccagcctggtacatcgctaacattccagcggcgccatcgttgcccatccccgtaagaatgacgcctacggcgttgcgccccgcgtgtttcgccaccgaatgaaacagcacatccacggaaggccgatgccggtttaccggcgggccatcatgaattttgatttgataattcgccccgctacgcgccagctccatatgcttgtcgccgggcgcaatgtaggcatgacctggcaatacgcgttcgccgtcctcggcctccttcacgctgatttgacagagtttattcagacgctcggcaaacgagcgggtaaagccaggcggcatatgctgcgtaataatcactgccggactggaaagcggcagcggttgcagcacatgtcggatagcttcagtaccgcccgttgaagcgccgatagcaatcagtttttccgaactgagcagcggacccgcttttaaggttgtcggggccgccatcggtttatgtgcggcgatgcgggcccgcgcggcggtacgcactttttcggcgatcatctcgctatacgccagcataccttcacgaatgccaagctgcggtttggtgacaaaatcgatggcccccaactccagcgcccgtagcgtcacttcggaacctttcccggtcagcgaagagaccatcaccaccggcatcggtcgcaggcgcatcagtttttccagaaaatcgaggccgtccatacgcggcatctcaacgtccagggtcaatacgtccggattaaattttttgatgagatccctggcgaccaacgggtccggcgcagtcgccaccatctccatatcgctatggctattaataatttcagtcatgatttggcgcattagcgcggaatcatcaactgacaataccctgattttactcatgctttatccttacttagcgcatacaccgtctgtccgcgcaggctaaactcgcgcacgaggttgctaaagttttctgagtgaccggcaaacaacagtccgtcaggtttaaggagtggaacaaaacggcgcagaatgtcctcctgagtcgttttatcaaaatagatcatgacgttacggcaaaaaatcgcgtcaaagggaccgggtacgttgtactgcttttccaataaattaacggaggaaaattcaacataattggccagttcctgacgcacgcgcaccagtccttcatgcggccccgtaccgcgcatgaagtaacgttgtagctgctgcggcgataacgttttcagttcgctgaggcgataaataccgcttctcgctttttccagcacttcagtatcaatatcgctggcgaatactttccagcgaccgggggccatccctaacgcatccgccagcgtaatggcgatactgtaaggttcttctcctgtcgatgccgccgcactccagacgcggtactcgccgtggcggcgacgcgcatgttccgcaaggatgggaaaatggtgcgcctcgcgaaaaaaagcggtcaggttggtagtcagagcgttgataaaagcctgccactcagcgctgttttgattagcctccagcatactgagataacggccaaaatcatccagtcccagggcacgcagccgacggaccaggcggttataaaccatatcccgcttatggtcggccagcacgatccctgcgcgctggtagattaattgacatatccgacgaaaatgcgcgtcggacagcgcgaggcgctgtgtcatctgtaacaatactgacgtttgcccggagggcagagatgatgtcatagcgccttcttaatcacattcaaagtacaacgggcgcgccctgcggcagcgccatgcttcccgtattacacattttttgcttttatctatgcgaaccagacgaaaggtatcggcgggttcgcaaattaatcgataaccgacagcgcacgtcgatcagaaggtttcccagttcgcatcatccctggcggctaatgactgcggcgtattgccggactgagcgttcactgacaaacgcatctcaggtttatttaccgccagcggtcgcgatgccaggcggaaagccgataccgcctgggtcagacggctggcctgctcttccagcgcggcggcggccgctgcggattcctgaaccagcgaggcgttctgttgcgttacgcgatccatttcggaaacggccaaagcgacctgatcgataccccggctttgctcatccgaggcggaggcgatttcgcccatgatatccgtgacgcgcgtaacggcattgacgatgtcagtcatggtttccccggcgctttccaccagcacagaaccggtatcgacacgcgagacggaatcttcaatcaacgcttttatttctttcgccgcctgggcgctgcggctggccagattacgcacctcgcctgccacgaccgcaaaaccgcgcccctgctctcccgcgcgcgccgcttctaccgccgcgttcagcgccagaatgttagtctggaaggcaataccgtcgataacgctgataatgtcagcgatttttttcgaactgtcggcaatttcgtgcatagtgtttactacgccgtcgaccactttgccgccatgacgcgcggtctcggaggcgctttgcgccagttgcgaagcctggcgggcgttatcggcgttttgcttcacggtggccgtcagttgttccatgctggcagccgtctcctccagagcggaggcctgctgttcggtacgggaagagaggtcggtattaccggcggcaatttcactggtgccggaataaatcgcatccgaaccttcacgaacctgcgttacggtgtcaatcagcgagcgttgcatatgttcaaccgttcccgccagttcgccaatttcattacgtcctgagacggtgagcgttttcgtcagatcgccgctggcaatttcacggatatgagtaatcactcgcgctaatgggttaagcagggcatgacgaatgccgaaccaaaccaccatcaaaatcagcaccagcacgaccgcaagaacccccagttgccattgcgcaaaacggtagtcatgagcactttgatcaaatgtctggcggtacaggttttcgctcacccgggcgtaattgcccagcgcctcgcccaacgcgttttgcattccctgggttggctgggcgaagtaggcatccatattgccattgtccagaaactgaataagttcggctaatgcggcctgatagcgctgatatttttcatcgacgttcgcgctggcctccgccatcgctggcaatggcgtcatatttttgaaattggcgtagtgcgccgccgcctgtgcgagagtcgtttttgcattctggagtaaatccgttttggcgctgctctgctggttagaagcgtccatcatcatgcgtgcggcggagcggctcaggttaatgcgcgtttgcagcattaagtcccatgtcgacgtgagttcgctttgttgctgacgtaattcgttagaaataacaaaaccttgctggttatgctgtaatgaagaaaacagcaaaccaccggaaacaagctgtagcagtgcgaaaacccccagcaccatcatcagcattgtgacaacgcggatacggttaaacataaggcaccttcctgataacgagttatcaacgttatcggcacctgcggtgataactttacttttgcaaaaaggaaatacgctgttccggaagacgacattgccaatgacagtgtcgcagcggcgatgccggcgcaaaatgcaggggctgggcgcgggcgatgaagaggcactctcaccgctggcggaagcataacggtgaatattgccggatggcgcgacgccatccggcaacgttattacgcgacgtgtgatgctgcgatatccagcagcgccatctcttcgctgttaagcagtttttcgatattcaccagaatcagcatacgctcgccgagcgcgcccaatcccgtcaaatattctgttgacaaggtcacggcaaattctggcgccggacggatctgttccgccgttaacgacagtacgtcagacacgccgtctaccactatcccgacgacgcgttgccccagattcagtacgatcactaccgtattgtcatcgtactcaacgtcgccttcgcagaatttcacgcgcagatcgacaatggggacaatcacgccgcgcaggttagtcaccccttttataaaggccggtgtattggcgatgcgcgtcacctggtcatagccacggatctcctgcactttcaggatatcgatgccgtactcttcatttcccagtgtaaacaccaggaattcctgacctgacggctcgccggccagtttgcttacattactcataccggtcatattattcccttctcactcaatcaggcggctgtgatcgccatacgttgttcgcggtttaaaccctgcaatgcggaaacatcaacaatcagcgcgacgctgccgtcgcccaggatcgtcgcggcggaaatccccggtaccttgcgataattgctttccagatttttgaccaccacctggtgctgaccgatgagctgatcgaccagcagcgcgtaacggcgtcccgcgctttgcaggatcacaacaatgccctgcgtggcttcggttttcgccccgtccacgtcaaacactttccacaattcgaccagcggcaaatactcgccgcgaacttccagaacccgttcgccgcccgccagcggatgaagatcctcttcacgcggttgcagcgactccatcaccgcattcaacggcaggataaaaacttcccccgccacgcgaaccgacatcccatcgaggatggccagcgtcagcggcagcagaatacgaatcgtggtgccggagccttgttttgactggatctcaacgtgaccgcccatctcctgaatgttacgtttcaccacatccatgccaacgccgcgaccggagacatccgtgacctgttccgcagttgagaatcccggcgcgaagatcaacatgcctacttcatcgtcggtcatgttttcattcaccgccatcccctgcgacatggccttcgccaggatacgctcacggttaagccccgcgccgtcatcggtcacttcaatacaaatattcccgccctgatgttctgcggaaagaatcagattgccgacaacatttttccccgcctcaaggcgtttttccggcatttcaatcccgtggtcgagactgttgcgcaccaggtgcgtcagcgggtcgataatgcgttcgatcaggcttttatcaagttcagtggagctccccaccagcgtcagctctacctgcttgcccagtttgcccgctaaatcgcgtaccagacgcgggaaacggctgaagacgtactccataggcatcatacgaatcgacatcaccgactcttgtaagtcgcgggcgttacgttgtaactgacccatactggtaatgagatcgccgtggtttaccgggtccagctcgttagaacgctgggccaacattgactgggtaatcactaactcgccgaccaggtttatgagctgatccactttctctaccgccacgcgaatgctggtggactcgcgttcacgcgcaggtttttcacgccccgcatgatgttcatgggccgcgcttttggcggctggcgcaacgactgccggaggcgctaccggcgctacctcggttttctcttgcgctttttcaaccggcgcggcgaccactttttcaaaagcgatctgatcggcctcgatgacaaaacagagcaccgcgacaatgtcatcttccgcgacgctgccatccagagttgccgacagtgaatccgcccccttaacgacatccgtcagagtagccagattgcccaactcttcttcaagcagatcgacctcattggctttcaaccgtgaaagtacaatgcgcagtttactctcgtcacgaggcgattcggtttcggctacgctctcttcctggatcgccgcgcttagtgccgcggtttctacgaccgccggcgtggtttcgcctttcgcctccagcgccaactggcgtagcgcattgcagatatattcgaagcttgcggcatccggctcttcggagtttttataggcgtcgagctgttcctgcataatatctttcgtttccaaaaacaggttgataatgtcggtattgagctgcatttcaccgcgtcgggcttcatccagcaggttttccattaaatgcgtggtttcctgcagaatagtgaagccgaatgtgcccgcgccgcctttaatggagtgcgccgcgcgaaaaatggcgttcagttgttcagcgtccggggactccggcaccaaatccagcagatgctgctccatatcagccaacagctcgtcagcttcatcaaaaaatgtctgataaaaatcgctaatatccatgctcacgctatcacctcggttccgcttttggcgatgtgggtacgcttgccggcggggctgccgcaggctgttgtaatacacttaccggctcattctggctttcagcgttttcatgcaaaatggcctgttccgcctgtttgtttaacaccagcaggcttatacggcggttgatggcgtcatcaggaccgcgatcgctcagccgcatcgtggcggccatgccaaccacccgtaatacttttccgttatccagcccgccagcgaccagttcgcgacgagaggcattggcgcgatcggcggataactcccagttgctatagcctttttcgccgttcgcgtagggaaagtcatcggtatggccggccaggctaatgcgattaggtataccgtttaacactggcgcaatcgcacgcaggatatcgcgcatatacggctcaacttcggcgctgccggttttaaacatcgggcggttctggctgtcgataatctggatgcgcaacccctcctgaactaaatcaattttcagatgcggacgtaacgcgcgcagtttgggatcggattcgatcagttgatccagatcgccgcgcagtttgtttaagcgactctgctccatccgttttttcagctcgtcgatattcggctgcttttccacttcaccctgctgttgggtgtaatcatcgccgccgcctggtatcgggctctcgctattggcaatccgattcccccccgttaccgcggtggccaacggcgtacgaaaatattcggcaatctgaattaattctttagggctggagatggaaatcagccacatcaccagaaaaaaagccatcatcgccgtcataaaatcggcgtaggcaattttccaggaaccgtgcgccccgccgccgtgcggtttgtgcctgcggcgttttacgacgacaatgggatgagcctgatttttcatgcttcctcagtcgtctgctgctggtttgggtttctcactgcgcgaacgtgttcttccaactcaataaacgatggacgctcactggaataaagcgttttacgaccaaattccacggcaatcggcggcgcatagccgttcagattagacagcagtgtgatttttacgcactgcatcatcttggtggtttcggcgctcttctggcgcaaaacggtcgctaacggtgaaatgaatccataagccagtaaaataccgaggaacgtacctaccatggcatgggcaatcagcgcccccaactccgctgccggacgatcggctgaagccagagcgtgaaccacccccattaccgccgcgacgataccaaaggcaggcagcgaatcccccaccatcgccagactgttggccgggacttccgcctcgctttcatgggtttcaatctcttcatccatcaacgcttcaatttcgaacgtattcatgttgccgctgatgatcaggcgcagataatcgacaataaaatcaagcattaccgcatcggccagaatacgcggataactggcgaagatttcactctcttttggattttcaatatcgcgttcaagggagaacatcccctgctggcgtgatttggccatcaggcgatagagcaacgccagcaaatccatgtacatagattttgtgtatttcgaacgacgaaataacaacgggatagctttcatcgtgcctttgatggccttcccgttgttgccgacaatgaacgcccctatccccgcgccgccaatgatgaccagttcagcaggttgatagagtgccccaaggtgtccgccggtcatgacataaccgccgaaaactgtaccgataaccaccaggtaacctaataagataagcacgacatcatccttccgctgttgactatgacaggatgcgcagtcgggcgattaacgcgaaggcaaggcaaaaaaaagcagcggtaatgacttaccgctgctggagtgtttgtccacaccgtttcggttaaacagcctgttcgatctgttcatccagcagttgtggaataatatcggcagcatctcgggaaagtttacgtctttttactgcgcgggatggcggctggcataaactacacgcaaagctgcctacgggctgatgcgcatgggtaataaagttcccaccgcagcagttacagctcgacaattcaagcaacccactttcaacaaaacgcaccagcgtccatgcgcgagtcagcgccaacaacggcccttcaggcggttgcggacactgctcaagataaagccgataagctttaatcaccgcatccacaccgctgcataagccggtcttcagtaaaaattgccaggcgttgcagaacatggaggcatgaatattttgctcccaggtcataaaccagtctgtcgaaaatggcagcatccctttaggcggcgggctaccgcgtaattctttgtacagcctgatgaggcgaccacggctgagctgtgtttcgctttccagcatttgtagacgagcgccaagattaatcaactccatcgccaactggatatcgcgagcttcctgaacaatgcttttttcactcattatcatgcccttttcttacgcgccgtatcgtccacttcattgagcagacgcgttgaaagcatgatacctgtgtgaatctgctgtaagtcatcgacgcgcgaatcctgagtcaaacgggtgatcgtctgatgatcgtcaaaccggaaatgacaaactaactggttcgtctccgccagtttgaccatctgcggcagggtcaacgcgcccagtgtgtttgccatctcttcgttgataccgaggcggaacatcgcagatgctttgtcctggacgatcaaacgctgtgcaaggagtaaatatgacaaattgatgtcataaatgtgttttagcaactcggatgtatgcattgttcccatccagaataaccaactttatttttgtgcgacgtagccgcaccccgtgatgtcgccgggaaggcccggtaaaagaagcaaaaaggtcaaatgcatagcagcgctcagacattatggacattgtgacgtataacgcagcctcccactgagattcgccttacacgtttacatcaatttttacaaatgcctaagatttttcctaattcgacgcaactctactcgtcagcttcgtgacatacaacggagcgggacggcgattttagaaaatatgtgatgcagatcacatattttaacggaatacttacgataaaaccatcagcatggcttttactttgtttaattaataacctaatgttcactttttctattccacactgctgaataggggtacgtcaacaccaaattcttttttgtttctctctgttaaaataacgccaggataatagataacaggctattatttctattttagaaacgcttttattttacctttagtaaacagtagcttaaatattaaacgttattaattaatctcgtcacagcatacgccctccgctgttaaaaataagctcatttgatttaacttttagctttccttgttcacccatttaaatgaagcatccgggtggtgtgtaaaaagtgtcttatgccacgattctttacataagaataattaatgattaattatgatgtccttcacattaatgtggcattagcgcattgcagaaatgcgataaacagagtaaagctaaagcacaatctcatattcttgcaatcaaggagcgagttatgagctacacccatattcttgtcgccgttgccgtcaccccggaaagtcaccagctactggctaaagcggtctctatcgcccgccctgttcaggcgaaagtaagcctgattactctcgcttccgatcctgaactgtataaccagttcgccgcgcccatgatggaggatttacgcgcggttatgcatgaagagaccgagaattttcttaagatgctgggggaaaaggcggattatccgattgaacaaactttcatcgcatcaggtgagttaagccagcatattttggctgtgtgccgcaaacaccatgttgatctggtcatttgcggcaaccataaccacagtttcttttcgcgcgcgtcctgctcggcaaaaagtgtcgtcagcgccagccaggtagatgtgttgctggtgcccttagcgggcgactagtcgccgctcgcgatatttcaggccagcttagggaacgtcgccacgttgttctgctgctgacgctcagggctacgcggcgtgacctcctttaggtcatgaataaaacgctcctgccagcggttaatgtcatttttaacgatcacgtccagcatctccgcatgacgcgaaatacgctcggcaaggggcatcgttagcgcacgattgagcgccgccgccacgtcatcccgatcgtaaggattgacgattaacgccgacgtcagttcattcgccgcgccggcaaactgtgacagtaccagtacgccagggttagcggggtcctgcgcggcgacaaactctttcgccaccaggttcatcccgtcacgcaacggggtgacgagcccgacgtctgaataacggaatatcttcattaacagtttacggtcgaaatgttgattcagataatagagcggcgtccagcccaattgtccatatttcccattaatccggcctgcttccgtctcaagctggtggcgaatatcctgatatgcctgtacttcgccgcgtgacgtaggcgcaatttgggtataacgaatttttccccgatgctgcggatagttttccagtagcgcttcatacgccagaaaacgttccggcagccctttcgaataatccagccgctcaacggaaaaaatattcttcacatttttcagttccgccttgagctgcgccagtttaggcggcaacggcccggcagcctgcagagcaatctcatcgggctcaataccgataggatacacttctgtctggaagtctttaccccacgcgatatgctgcttgccgctgcgagtcgtgactcgcgtttgactcgaaaggctatccagaaaagccaggcgatcattttcggtctggaaccctagcagatcaaagtcacacaactgctccagcagttcatcatgcggcggtaaggcgttaaaaatctccggggtcgggaatggaatatgcaggaaaaaaccaattcggttgttcacgccgcgtttacgcagctcgctggcgaacggtaacaggtggtagtcatgcacccaaatgatgtcgttctctttaatgaggggcaataacttatccgctaataacgcattcacccgcatatagccttcccatgcaggacgctgaaactgtaccaggtccagacgatagtggaacgcaggccagagaaccgcattggaaaattgacagtaataatcttcgtaatcttgttcgctcaggttaaacgatgcccaggtaatattaccttttgtcaccttttttaatggctcatcctcgttacctgtctcgccactccagccgaaccacaacccgccagccgcttttagcgcgccaagcacgccaacggcgaggccgccggcgccgcctttattatccgggggggcaattcgattagatactacgactaaacgactcatagccatctctcctgttattcattacttgttgttcttgttgtggataattgatttgttccagccagcgccagacatcgggtacgctttccagccgccatgccgcctgggttgccccgacgcccacttttacggaaattccgccagcgtgattcaccacgccaaagccagcctcatcggtcaaatcgtcgcccacaaaaacgggaatccgtcccgcaaagggcgcctcctgcataaaggcggcaatggcttcgcctttattggttcccttaggtttgatttccacaacacatttaccaagctgcaacgccagttgcggccagtgctgcgtaacgtgttgcgcaagcgccaacagcgccgcttcatgttccggagcctgacggtagtgcagcgcaaatgccatccccttcgactccagctccgttccgggcagcgctacaagcgtcgaacgtaataacgcctctacctcacggactaccgcttcaggaaggcgcacgatatgggttttaccattgatgtcacgacgctctgccccgtgaacgccagcgagtggaaagcgaaaaggcttcgccaaagcatccagctcagtcattgaacgccctgaaatcaatgccagtgcccctgcgttgtgcgccgcgagacggtctaacaactgaaggattttatgcggtaccactacctgatcgggatgaggctttatctctgccaatgtgccatcaaggtcaaaaaaatacgcatagttcgcagtgagttcgggggatacggttaacggttctgccaccctggtctcctccttatcatcatattgagactcacaaacggtctcattagtcatgtaagtatagacagtgtgacgctgctcgccatttagaaagaccatcgccagccggggtagcggctggcgatgacgtgaagctatactgtttagttgagtgttaattcatcaaatcgtacgcttcgctttttgcttataatggtcgaagataactgttgtcagaaggattcagccgcgaaccatacactgtgcaaaaggtgaaatgttgagcaggttcatcgcgctctccaccgctcctgatatcagtacgctcgccaccacatatgagacttttccgaggccgcctttcaggaatcccccccctaagacacacgcagaaataacgattaactcataacccagggaagtcattgacctgctttagcgttttttatgtagggtaaaatcaaacgattcttgttagagaagacgtaaaacggtgcactgtctttcattcattagataaatgctgatggcaggaatagttttagcggaaaatgacataacccagagcgaattcatcagccaaaaggcaggaaagccagcacattaatccataacatcagccagctaatccttacggccctgggtgaataacgattaccagggataatagatatgttcagcctgttcgcgaaccggcgcatcgtctcccagcagtctggcggaaagggttagcgcgaaatcaaagacatgacccaaccctttgccgctaattaaattaccatcttcaaccacgggcgcatccacatagacaccttccggaaccgctttccacagatcgccggaacagacataacgacgccccttcagcaatccgtgagcacccagcacccttgccgccgcggaacagataggacaaattaatttgcctgccgcatcatgacgcgcaacgaaagcgatcaccgccggattagccgccagattagcgctcccctgcggaccgcccggtagcactaccgcatcgaaaagcgcctgctggcgttcactcagcgtgctgtccgcaaccataggaatatcatggtaactcaccaccgcccgtgattcagcacacgccagcgtttcgacgtcgatatgcaaacgtcgcagaatatcaagagtaacaatggcctctgcttcttcaaatcctggtgccaacagcaccgcgacctttttcattgactgctccttgttaacgagtcacccagcaaaactgcgctcaaccgaataacgtgctcgtatgattaatgatattaaaaatgatctaccgcaaaatcggctagtttataaaaacaggcatatttgctctcaaccgtttatgcgtgtgatatccagactgactaatgtttattttattgaaattaacatacttgaaaggcttaacccatgatctgaaacaatgtttcacaaattacaaatctatataatatcatttaactttcaaagggttgcaactgctcctcatccaaaatcattacacctgaaaaaatcacaccgctgaaaatgtaaaaaaagataaacaattgcatttaaggattttcttatttttattgacgcgctattctcattaccgatcgataaacaggaaatgagatcgcataagggactggcggaacggagttcttctgctaagagtatttattgtgcatagaggtaagaatgtgacaacggcccgttgcattctcgtctgtcatgcacatcaacactttctggaaataaggatattgttatggcagctgtaggaatggttcaaaagctcaacacgccaatgaaccttgagttttacgcatcaaatctttacctccatctaagcgaatggtgttctgaacacagtttaacaggcaccgccacctttcttcgtacccaggcgcaaggcaacgtgacgcaaatgatgcgcatgtttaattttatgaaaaacgccggcgccacccctatcgttaaagccattgacgttccgggtgaagagctctgctctctggaagaattgttccagaaaaccctggaggattatcagcaacgcgccagcacgctgtcgcgtctggcagatgaagcgaaagcgctgaatgatgcctcaacgcttgattttctccataccctggaaaaagagcagcagcaggatggcgtacttttacaaactattctcgaagaagttcgcagcgctaaacgagcagggctatgcctggcgcaaaccgatcagcatctccttaacgtcgtgacctatcagcatcactgatagcggcaccccgagcgacaatattgagacgttattagccggatagcaacgcgaagcagcttatccggcctacaccgtttctgatctgtttgccagaggtggtgcctgtcgctactggcgtattatcggcacatcatgccagccgacaggcgcgaaacgcctctgtcttgtctgggcattaccccagcatctcacgtacaaacgcttctatttctttattctggccgttttcaaacaaacattgctggaaacgcggccctgaaaccgccgttttaaccagttcaggatcgatagcccgtagtgtatccagataattctctttgacgaccgcggccttaacctggttcaaaatgcccgcattgcgtacctgcggcgctttgcgctcaggcggatacccctcgcctttacgcccggtaaacgctttttcaaagatgaaacgcacgttcagctcagcgccccagccaaagcctttcgcaaatggcagggacaacgcattgccgttgttgatctgcgcaaacagaaaagcatctgccggatcgatgcaatagccacaaatgacacctggatgaatatttaacgacatcagcgcgccctgaccagtgccacagccagtaaccacaaaatcaaccgcgtttgcattaagcagaatactcgccatgatgcctaaatgaatgtacgtcaggtgatggtcattttcgtcgcacatgccgacgttaaaaacgggaaatcccttttcattggcgacggcgctaagttcgttataaatgatggcatttttgctggcctggctattttccatcatcagtgcaattttcatcgtgtttctcctgaatgcagacggtcgcgcctgcgtaaatcatgacgttttacccacattacacatttgagaacacacattcaaatttaataaaaccaggtttcattaaatgaaaagacgctcacacattttctgttcccgctgtaaatcccctgccgttacctttaatcaaggcgaatccgtaagttattccagccattgacagtgcaagacacgaggtagcatggtctgataccgaactgtcggagcgattttatgaagcctcttatttttactctttcactgctagccctgacgggatgcaccattactcgacaagcgcaggtcagcgaagccagcccgataagcggcatcgtgcgcctgacgtataaccagccgctattttttacttcacggacagatgattatgtatctcacgggaccgcaacacgcgaatgccagcagatgggctatgccgatgccgtttcgtttggtcagccggtaggaacctgtagcatttatgcgggctcgttgtgtctgaacacccgatttaccctctcctggcagtgccggggcgttgccgtcccgcaaatcatgccgctttattattaaggcggctggcttaacgtcgacaccatctacaatggaggagagtgcagggtcgctattgccagcatgaaggtgctggctttcctttatttttatacgctatacactggcgttaatgcgttttattcccattcgtatttttaataattaaatttaatattttaccttttgcaaataataaaataacaaattatagtggcgccacattaccgtatatcttttgctatttgtggagcggaaccatgctgaaaacagaaatgatcgacaaactgaatgagcaaatgaatctggagttgtactcctccctgctctatcaacaaatgagcgcgtggtgtagctatcacagttttgaaggcgcggccgcatttcttcgtcgccatgcgcaagaagagatgacgcatatgcagcgcctgtttgactaccttaccgataccggaagcctgccgcgcattcataccgtttcttcgcccttcgctgagtacgcctcgctggatgagctgttccgcgcgacctatgagcatgagcagcttattacgcaaaaaattaatgaactggctcatgccgcaatgaccagccaggattatccgacatttaatttcttgcagtggtatgtggcagaacagcatgaagaagaaaaattattcaaatctattattgataaattaacgctggcgggaaaaagcggcgaagggctttatttcattgataaagaactctccaccctggatacgcaaaattaatccaacacgtccttacacggtgagacgcgctctcaccgtggcgtattaatggcggcagattttactctcatgcgttgaaaaaccgtcctccaccgcaataaactttcctttcgccgccagaaacgcgaccagttccgccgccgtcatatctgatgctgaacaagtgtgaaatcgtgcccgctcgccaaagcgcgcttttattgccgcctccagcgaggtatgcgtgtactgctcgccagactcaatcatcatgttgagcacttcgtgaccatgaatggaatccataacccctcctgaataaaactcgtagcctaatgtgtccgtgtacaagcgactttgcgctagcgcaggtttacggcggttgtccgcgtctccttccatattcgcttttatgcccggaactgtaaattttacagtacacccattgtaacgaccatttgacgaaaatagcgtaatgccttaccctgcgccgcggatatcaccgttctttgttaccggggtagtagaaagcgtgaaaaacagaactctgggcagtatttttatcgtggcaggcaccactatcggcgccgggatgctggcaatgccgctggcagcggctggcgttggtttcagcgtcacgctgggattgttgattggtctgtgggcgctgatgtgttataccgcgctactattactggaggtatatcaacacgttccggcggataccgggctgggctcgttggcaaaacgctatcttgggcgttacggacagtggcttacgggattcagtatgatgttcttaatgtatgcgctcactgccgcctacatttccggagccggagaattactggcatccagtattaataactggcttggcgccacgctctcgcccgctgccggagtactgctgttcacctttgttgccggtggggtggtatgtgtgggcacctcgctggtcgacctttttaaccgcttcctgtttagcgcaaagatcatttttctggtcatcatgcttgcgttgctcacgccacatattcataaagtaaatcttcttacgcttcctttacagcaggggctggcattgtccgccataccggtcattttcacctcgtttggttttcacggaagcgtaccgagtattgtgagttatatgaacggcaacattcgccggctgcgttgggtctttatgacgggtagcgccattccgctagtggcctatattttttggcagctcgccacgctgggaagtatcgactcgccgacattcagagggctactggccagccatgccgggttaaatggcctgctgcaggcgctcagagaagtggtcgcttcgccacatgtcgaactggcggtccacctgttcgccgatctggcgctggcgacctcttttctgggcgtagcgctaggattatttgattacctggccgatctattccagcgccgcagtacggtgtccggacgcctgcaaaccgggctgattacctttctgccgccgctggcgtttgcgcttttctacccacgtggatttgtgatggcattaggctatgccggcgtagcgctggcagtgctggcactactcatccctgccatgctggtctggcaatgccgtaaacagagccctcaggcgggatatcgtgtggcaggcggcacgccagcgctggcgctggtgtttatctgcggcattgtcgtgattggcgtccagttttcgatcgcactggggttcctgcccgatccaggttaacgccaggcaaagattaccgggcccggacgccgtccaggctcgataatcatcacgctatggccgtttacgagccattaatgcaggcagcactgcttaaattttttgccgctcccgcatggacaaggatcgttacgccccactttcacctctgcttttatcggcatctgtagcggcgtcgtgtgcggatgcgccatccaccaggcatgcagctcaagcgccgcgatacggatagcgtcaacgcttttatcgaacgcttccgggctcattttatccaacagcgcaaagttttcttccgtgccgtgtaaggcaatcgcttccagcgccggttttagcgtatccggcaagtcagaccagtcggacagcgacactccgcgcatgtaaccaaagcaccattcttcaacaatcgttaattcatggccatcaacttctcgcaggccaaacagcggctcgaactgttctggatagtcttcaagccgggcggctgtgtccgccatgtgctggaacaccagatccataaatcgcgtcatttctttttcagatgtccagcgcggtacgtacgcgggtcccccccatatcgcgaccagccactgttccgggtcgatgggacgcggagaacttagtaccgcagtaatcagaccgtccagctccgcgacatccaaaatggcctgatcggtattgtatttcgtcagcacatcatccagccattccagctcgttctcgtttaatggttccattttcataacgcttttcctcagtgatgacttccgcctgtaggcctcttacattgcagcggataaaaataatttttttgcaggcagttggatggcaaccatcaggggccagattaacacgaaatgaggaggattccggaagttaacgcacaaaaggaggatcagggcgcagattttccgccaggaagcgctcgccccacacaaaagcgagagatgggtttctcgctatattatactcatgctaacttataccaccgccgcggacagataaaaccgccctctcaaatagagcttattttcagtaaaaaagtgtttaatgagttcgtctaccgcttctctgtcagcagaaaaggttatttccataaacagcgtatcgtaccctattttgatattttttttcttacagtaaacacggatctcatcctgcacactcagcaacggcaggctaaatgtgtatagcggttgcggttcttttttcgccgctttctcaaaaactttagtgaccagatccccaagatcgcgctctgaccgggcaccgttattaaaatgcaataaattacgtctttttaccacccagcctccagccagataccgccaacaataactctcacttcaatgtgtgaggcacataatcacatccagaatcagctccagatagtatttcaaataaacagcccgcactatagcgcatacttttttcagacacagtttacagggatactctctttatatccacgcgcacggttgccttaatcatgtcttccgcgataacacagtttgtcaacctattctatataaccaagcttaaacagaaccttaccagccagtgatatcagctcaggactttcaggataaaaacgcagtaacggcaaaaataccgcctcaccgataatgctccggctattagcatggtttgggcgcaatccccagatattctgataagtcatcggcacgacctgcccattcatggttgtgttaccgatatacagcataatatgccctggaatatagaccagcgtagtaaacggttttccgtatctggtgagataatcgatccgcatttggggacttttatgactaagatcgaccacccgtccagcagcctctacctgcgcggatgaatgtctgggcaggaatatgccaaacggcattaacaggctgcggatttcggctgaacaatcattataaaagttaaaatttccccaaccgtagggggcgccgtacattgctttcattagcacggcgatattttccggcgtcattttccacggcatagccgtaaactcgttaccgcttagccagacccaatggataaacgcgcgaccgttgctgccgcgaactggcgccgcaatcaggaactggcccgcccgttgatgtcggaacggtaaaatagtgcccggtcgcccggtgaaataatagacgcctgcgacatggacagaaaccggcgcgttgataaatgcccccagttgcttatgagcaagcaaaacccactgtgttataaatttctgatccgtactggcaatatcttcactatgaacccagccagttaccgctggtgaaacgacatattgccagcgttggtctttgctcttcgtcagcgtatagaccggcgtaccgggacgcagcgaagacatttgtaaattatcaaacgggtacccctcgcccgcctgacggggatcgttaaagagcgggtcgtccgttggcagcgctctgactaaactttctctgaccataatacctcgccgggaggcatgatagatattgtcaatctgcgtatccgtattccctctaacctcctctttccagcgagaggtataaagtctgaagttttccccccaataagcactgccgtcgctaagaaactgcttaatactggcatcccgcgcctgtgctgcgttttttttcagcaatgcggtaatataaaaaccattccacggcgagtgcgcttcactgtccattccgaaataatgagattttagtgcgttaaagtagcgttgttgggtagcattatcaataaccggaatagtgtaatcagccgagtccggaggtatccatttatcaaccgactgtgaataatccgctaacggaaagcgtgtttttgtcgggtcaatatagctccctgtgaaaatttcatctttggctgttgatcggtaggtcgtctggtggcaagcggtgaggcacaatggtatcaataaaacggcccaggttttcttttgcatcatcatctccgtaaagcggggaaagcataatatagagactgaccaaaaccgccattcacgaaaacctgaaattatctgtagttgacctgttattaagacaatattgcaaaacgtgattaaagcatgatgcggatcacattaccttatgatgaatattagttcgctatctacctttaattaaactgtgcagaaaacaccctgaacagttatatactcgtttaatttgcataaatactccactgacccgcccctgtttttttcagacaatacatactgtagcgcgtcagttctactttttttatatactctgcaaagtcgttttcatcgacgtagccaataaaattacgcgcatcacatgtcgaagaggaaagctctcctggaaaagagtaggttacgattgcactctcaggctcatacaaaataaaaaaagtagcaaagcgcaacctacaatcccaatattaatgaagctaataaataattttgcattatcggtatatttcactggcagacctactctctttaataaagcaggcataaaacatatcagcattttttatagagattaatggattttatcggctgatttacccgacgtttagtaattaccaggcataagttcttgcgggtcggtagcacataactgttgtactggcagaaatgccgctaccgatgttttttactgtgtatcgcgctggaaagttcacgctcgcggtcggcatacaaattgaaggcacaaaaaaaccacccgtaggtggtttcacgacactgcttattgctttgattattcttgtctttcccatggtacccggagcgggacttgaacccgcacagcgcgaacgccgagggattttaaatcccttgtgtctaccgattccaccatccgggctcgggaaaaattggaggcgcgttccggagtcgaaccggactagacggatttgcaatccgctacataaccgctttgttaacgcgccaaatttttttggcttttcagccagcatccgctttacgccaatgcttttaaactggagcgggaaacgagactcgaactcgcgaccccgaccttggcaaggtcgtgctctaccaactgagctattcccgcagtatcaagcaactttgttaatcacttgattttgttatcgtctggcaatcagtgctgccgttcgatgcgttgcattctacttacctgacgcactgagtcaacgatatttttcgtcactcacgatcgtttgctgaaatttgcggcgaaacgatcactgatcaagcaaatctccgcgtgcagcgctcaaatattgcaacatggaccacaatgttagcaccgctgcgacaaagaaaagcgcgatcccggcatactctacccagatattcggacgccacaagagccacgccagcgccaccatctgcgcggtagttttgactttaccgatccaggagaccgctacactactgcgtttgcccagctccgccatccattcacgcagagcagagataataatttcgcgggctatcatcgtcgccgcaggtaacgtcacccaccagctatgataatgctcggtgaccagcaccatggcgatcgccaccagcaccttgtcggcgacggggtcgaggaaagcgccgaaacgcgtactctggttccagcgtcgcgccagaaagccgtcaaaccagtcggtaatagcggcaatacagaaaatcagcgcgctgaccatcggcgcccaggcgaacggcaaataaaacaccacgacaaagaatggaatcaggatgacgcgaaacagcgtgagcaacgtagggatattaaattgcatagtgacgggtaactatctgttgtcagtgaaattacccctatgttgctacagtggcctcaatgtttcaacgaccagaagatcttttctgccagaccttgcgaaatacccggcacttttgcaatttcttctacgctggcgttacgtagtccttgcaaaccgcccatatatttcagcagcatctggcgacgtttaggcccaacgccttcaatagtttccagcgtactggtatttttaaccttcgcgcgttttttacggtgcccgccgatcgcgtgatcgtgcgactcatcgcgaatatgctgaataacatgcagcgccggcgagtccggcggcaggctaaacccctcgccttccggttcaaaaaagagtgtttccagaccggcctttctgtccgcgcctttggcgacgccaagcagcaaaggacgatgcttatcccaggggacatccagctcagcgaaaacggctttcgcctgggcgagctgcccttttccgccgtcgatcagaataacatccggaatcttactttcttctatggccttgccataacgccgacgtaacacctgattcatcgccgcgtagtcatcacccggcgtgatgcccgcgatattataacgacgatactcggcgcgtaacggcccgttagcgtcaaataccacacaggatgcgaccgtttgctcccccatggtatggctgatgtcaaaacattccatccgcttgatcgcaggaagttttaataccgccgccagcgcggtcaaacgctgcgtgatggtggactgctgcgagagtttagtgattaaggccgttgccgcgttggtccgcgccagcttgagataacgggcgcgatcgccgcgcggttttgtctggacatgaatacgccgtccggcaagttccgacaacgaatcggccagcagcgttttatcactcagattaaaatcgagcagtatctcgcccggtagcgtgcgcatctggctaccctgcaggtaaaactgcccgacaaaggtttccaccacttcgcccagttccgtaccaccaggtacttttggaaaatagctgcggctgcccagcaccttaccctggcgaataaacagcacatgcacacaggccatacccgcatcaaaagccacgccgataacgtcgagatcgtcgcccgcattggagacaaactgtttttccgtgacccggcgtaccgcctggatctgatcgcgaatacgcgccgcctcttcaaatgccagatcctggctggccttttccatccgggcaatcagctgtgttaagacctggtcgtccttaccggacaaaaacaaccggacatactccacctgttgcgcatactcctcctcgctgaccagtcctgcaacgcaggggcctaaacagcggccaatctgatattgcaggcaaggacgcgagcggttgcgatatacgctgttttcgcactggcggatagggaaaattttctgtaacagcgccagcgtttcccgcacggcatagccattaggaaatgggccgaagtactcgcctttcgcatgtttggcgccacggtgcatcgccagacgcggatgggtatcgccgctcagaaaaataaaaggataggatttatcatcacgcaacaacacgttgtaacgcggttgatacaacttgatgtaattatgctcaagcagcagcgcttccgtttcggtatgcgttaccgtgacatcaatgtgttgaatttgcgcaactagcgcttcggttttacgcgaagccaggttgctgcgaaagtagctggaaagacgctttttcaggtcttttgctttaccgacataaataaccgtaccgccggcgtcatacatacgatagacaccgggttggctggtaacggttttcaaaaacgcctttgcgtcaaatatttcactcactggcttgttaacgtctccgcattacacaggccatggcggattgccaggtgagtcagctcaacatcaccatgaatgtttaatttactgaacatacgatagcgatagctgttcaccgttttaggactgagattcagctgttctgaaatctcattgaccttctgacccttggtgatcatcagcataatctgcaactcgcgttcagacaaactggcgaacggcgtttccgtttttgcaggctcaatctgactgagcgccatctgctgagcgatatcggaggcgatataacgttgtccggaatacaccgaacgaatagcgctcaccacctcctgaggcgcagcgcctttgctgagatagccagctgcgccagcctgcatcactttggcgggcaacgggttctccgtatggacggtcagcatgatcactttgatatccgctgtcgagcgggcaattttacgcgtcgcctcaaggccgccaataccgggcatgttcatatccatcagcacgacgtcaacggcgttagtacggcaccattttaccgcatcctctccgcagcacgcttcaccgacaactttaatgccctttatatcttcaagaatgcgtcgtatccctgcgcgcaccagttcgtggtcatcaacaagaagaacgttgatcaaaggaatatctccagaatagggataacgctactgatagttaatcgtccttatattagctggttttatctcaactttgaaacgtaaaaaaacaccgggtattcgattttgctctcgtttttggaaattatgttgtacgtcatgtggcaactgccaacgttgtagccccttctggcggcgctgtcccgggctgatatttcataatggtgacaaaaatttcacgttccgctgtctaaacactaattagagaatcaactttgtaacaataattaacgagtgaaatacgcgtaataaacaaagaatgaagaaaatatatgcatcacgcggcaacgtttattttgtgggtaacccctccgctttttgatcaaaaaacaaccactgctatttttagcgtagcttatggtatactccgccgccttaacatctgctatcgcacattttcactgaaacataacgaggaaaataaatgagtacgcctgatttttccaccgctgagaataatcaagaactggctactgaagtcaactgcctgaaagccatgttaacgctgatgctgcaggcgatgggccaggccgatgcagggcgcgtgattcttaaaatggaaaaacagatcgcgcagatggatgatgaagcacaagcggcggtattttccagtacggttaagcaaattaaacaggcttaccgccagtagtaaaaaaccggctgttagcatcgctttcagccggtttcgcgtctggcgcgaagcatcgtcagcacgtcatatcagacctgtcgccgcagcgtagcaggcaatctgtgttttatttggcgcattgaatttcttctgcatatttttctgatggaagttaacggtattttcagaaatcgacagaataatggcgatctccgatgaggtcttcccttccgccgtccacttcagaatctctttctcacgtttactgaaacgcatttcaggcgccatcaccatgtcgtcttcaaatcttgtcagcgccgaaagactctcccgcgccagcagttgcaacctcagctccacttcgtcgtaggtaaacgaggagcagcgtaaactgctacgggagaaagataaaaagcccagcgcccggttcggcaacatcacacactgggttacgcctctgcgtaatccgaaacgctgggcggcatcccacatcgccttcgcttcatgaaatagcacgtcatcccaatgtaaatgaccctgcctgaaattttccggctttaataccggatcgatcgcgaaatagttttcggactggtaatgcgttacccacgccggaggataagtggtacgaagcgatattttaggccgggtaaaggggacgggatgacgaacacacagggcataataatcaaattccagccgctgtgtctgatattgcaattcagtataaacatcctctgctgccgccatctcctgaaagcgtaacaacattgcgcgtcgccaggtgaagaaatcattttcctgcatattttatggtcacgcctttgatattgataatcattattatgaatgacttaaattaacacataaatagtgtttatatataagaaatatcggacgaaacgtagaatacttgagcggcattacactttttggcttccgcctgagagcgaggttaataatctggcagaatgacttcataattattcattgcgctcgcccaaggcgcggctaattcgggcgagcgttgaaaaggcattatttcactaaaaatttctcaaggaactggcgggtacgcggatgctgaggatcggcgaacaaggttttcgccggcccctgctcgacgatttgcccctgatccataaatattgcccgatcagccacgtcacgcgcaaagctcatttcgtgagtaacgatcaccattgtgcgcttttcctgcgccagctggcgaatcgtattaagcacctcgccgactaattcaggatcaagcgccgacgtcggctcatcaaacagaatcacttccgggcgcatcgccagcgcgcgcgcaatcgccacgcgctgctgttgcccgcccgacaggcggcgcggataacgggactctttaccggccaacccgactttggctaacagttcccgcgccagcgccgtcgcctcggctttcggctctccctttacaatcaccggaccttcaatgatattttccagcacggtacgatgcgggaacaggttaaaactctgaaagacaaagccgacatgctggcgtagctggcgaatcaaccctttttgctggctgaatgggcgggcggtatcgatgataatatcgcccactttaatggtgcccgcttccggttgttccagcaggttaatacagcgtaataacgttgtcttccctgagccgctcgggccgataatggcgacgacttctccgggcttcacctcaaggtcaataccgtgcagcaccgtttgaccatgaaattttttgaccaggttggtaacttcgatcgcactcattttggctctctctcctggcggttaagctggttttcaaaatagttttgcagtgccgataagacggtcgccattacccagtagattaacgacgcggccagatacatggtaaacacctccagcgttcgcgaggtaattaactgcgcctggcggaacaactccggcacctgaatcgtcgcggcgagcgacgtatctttcaccaggctgataaagctgttgctcaacggcggaagcgcgacgcgagcggcctgcggcaaaatagcgcgacgtagcgtttgccacggcgtcatgccaatgctcgccgccgcttcccattgtcccttgtcgatagccgagatcgccgcgcgcagcgtctcggacgtgtaagccgcggtattgagcgataaaccaatcatcgccgccgggatagggtccagctcaataccaaattgcggcaggccgtaatagatcataaataactgggcgataagcggcgtaccgcgaaaaatcgagatataaaagcgcgccagccagcgaaccggccatagcggagacatccgcatcagcgccagcacaaatcccagcagcagaccaaaaaacataccgccaatactcagttgcagggtaaagacggcgcctttaagcaaatacggcagcgattcaataaccagttggatactttcttgcattcgcgttgattacctggaggttatacatgaggatggtaggcaaacagcgcaggcgccccaccggtgtgaataaagagaatcggcccgtcatcgttaaagcgtttctggctgatgccgtctatcagacccgccatcgctttaccggtatataccggatccagcagcaccccctccaggctcgccagcagtttcaccgcctccatccccgcgtcatttggcacgccgtaacccggggcaaaatagtcatcccataaatggatatccgccgtcgccgtcagcgccagctgaccggcaatagcctgctgcaaggcaatcactttgggtttctgctcggcgacagaacgtgaaacggtcacgccaatcagttcgacatccggcatcagatgttccagcccgacagctaacccggcgtgcgttccggcgctgccggaggccaccaccaccgaagagagcccgacgacctcttcacactgctgggcgatttccagggcgctctctacgtatcccattgcccccagcgcgctggaaccgccgaccggaatcacatagggcctgaacccttgcgcttcaatgcgcgtcgccagcgtttgcagctgcgcatccggatcggttagcgcatcgcacatctcaatttgcgtattaaataaatccagtaacaggcgattaccattcgtcaggtaattttccgcggtggtaccgattggattttccagcaaggcgacgcaatgcagtcccaatttggccgcgactgccgccgtctgacggacatggttcgactgaatcgcccctgcggttatcagcgtatccgccccttctcgcagcgcgtcggccaccaaaaactccagcttgcgcagtttattgccgcccattgcaatgggcgtaacgtcatcgcgcttaatgtaaatctcacggccaagataatcagacaatcgcggcaggtattcgagcggggtcggcgcgccgataaactccaggcgagggaagcgcgttaagtgatgtagtggcattgagcctccggtaacgttgtggtgtgttctttttattatgcacgttgatctaacggaaataaaaaaggcgccgattcacgcgcctccgtttgctgacatagtatgaggttgatattgcccggtggcgcactgcctgccgggcaacgtagaacattattgggtcacgtcagcgccaaaccatttttcagagagcgcttttaaggtgccatctttttgcatttccgcaatggcgttatctaccgccttcagcaagtcttcgttgcctttacgtaacgcaacgccggactcctgacgcgaaaacgcatcaccggtgacggccagcgtacctttggtttttttcaccagatccagcgccgccagacgatcgactaaaatcgcgtcaatacggcctacgcgcagatcctggtattttgtaggatcatcgtcataggtacggatatccacgccctgcacatgttgacgtagccactcttcatagttagtccccagcccaacgccgacttttttgccctgcagatcggcagccgttttgatcgtgccttcattgccttttttcaccagcgcctgaatgccggagacagtataaggcgtagagaaatcatattttttcttgcggacgtctgaaatcgtgacctggtttatcaccacatcaatacgtttagcgtccagcgacgccagcattccgtcccatttggtcggcttcaacgacgctttaacgcccagatgttttgccaacgcctcggcgaaatcgacttcaaaaccggttaatttgccgtcttcgccctgaaagctaaacggcggataggtaccttccagccctaccagcagcgtgccgcgttctttaactttgttcagcaaaccctcatcggcaaagctcttcgcgctcattcccgccaccagcgctacagccattactcccatcagtgcctgacgtcccagcagtgctaatttcatagtaaccccgaatattgccgttaatgaccatagactgtgtcccgccatggcgcatcgtcacgtctcgcgaacctttgggggactcagcctaatgtagaaggtttgccacgtttcaccaacacgactctgctacatcttatgcttttttaatatatatcagaactggcggtaaagggggatttctgtctgggcgcaatctgctgatgcgctttatattgctggtatttacgcagtgcgatacggtaattattggtgctggtttccggcaaccatggcgccaggctttcatcgagaaaaccgtcctgcagcagatcgtgggaaatgttttgctcgctgaggtaattgccaaggcgtcgtaaacgcacgacatattcccgcaccgtgccatggctcatctcggtttgttcaaacaaatactgcttgaaaccgataatatcgaaaaaatcactctgctttttgcagtgcaaatcgccgcaaaagcgacacagcgccacccactccttctgctcccgctgccaggcagcgtcgtcaagtagcatatccagctgtgaaatagcgattttattaacgatcttgccacggcgaaccagcgtaatgcggtcgagcagtttgtgacaatgcgcgcaatgcgtctggctgtgtttaaagtctttaagatagcggctcaaaggccgccttttaggttgctgcaccgtcatgagaactcctggtagtctatacgttgtgcggcacttttcgggtgcgatcatgcgcgacctataacttacccagtttggtgcgtaatcgtttgatggcctgactatgcaactggctgacccgcgattcgccgacttccagtaccgcgccaatctctttgagattgagctcttcctggtaatacagcgttaacaccagttgctcgcgttccggcagcgattcaatcgcatccattacccgctgtcgcaggtcgccctccagcagttgatgtaacgggttttcctgttgatgttcttcagtcaccagttcgatgctatcgccatgctcttcccgccactcatcgtaagagaaaagttggctgttgttggtatcgagcaacatctgacgatactccgcaacagggatgccaagacgttccgccacttcggtttccgtcgcattacgccccagttcctgctccagttgtcccatcgcctgcgccacttcgcgggcattacgccggacgctacgcggcacccaatcgcggctgcgtaattcatccagcatcgccccacgaatacgctgcactgcgtaagtggtaaatgccgttccttgcaaagcgtcatatcggtcgaccgcatttaataacccgatgccgcccgcttgtagcagatcgtccagttccacgctcgccggcaatcgcacctgcaggcgcaatgcttcgtgacgcaccagcggtacataacgctgccacagcgagtgtttatccattacaccttcagcggtatacagtgaattcacgataaacagccctgcgttaaatgagttatcggcatgattatccgtttctacagagggttctatcgaaggaataaggctataaaagaagggttatttcacttatgtaacctgtagcgcctttttagcggctaaaagagcagaataaaatcagccagatagaataaatatcctccggcatagccggaggtttttcagatgcgcctataaggctctcttaccagccgcgccctaacaggcgcatacgatctgacatttgcatcaaacttcgttacttacggcccgtaaacgggctgcccggatacgggatcgataattgctcacccattttatcctcttcaagctggtgctttatgtagtcctgtatcttcgccgtgttcttacccaccgtatcgacatagtaccctctgcaccagaactccctgttcctgtatttgaattttagatccccaaactgctcgtaaagcatcagactactttacccttcagatatcccatgaaactcgacacactcatcttcggcgggatctccagaagcatgtgaatatgatctgcacaacattctgcttccagaattcgtacgtttttccattcacacaattttcttaatatgctgcctactgccctacgcttctctccatagaacgcttgtcttcggtatttgggcgcgaaaactatgtgatatttacagttccatcgggtgtgcgctaagctcttttcgtcccccattgggacccccttttgatttcttgttgaacttttgcagttgccagaccgcaagatgttttaacaaatcaaaaggggttttaataactggcttaaagctgaaagctttccggaacccccagcctagctgggggttttccatagacaataaacgggatgcgcaaaagcccaccccgaacaaaactatgtcagaagatgaatcatcgacagatcgtcgccagtacgcaccgtttctatatggcgatgaaaattcttcgccacctcgctgttatgctggctgcgggagtgaaaactatacacaatattggtaacgtcatcccactctatacgcccgcgctcatgcacgctggctgccgttaatagcttaataaaggcatattccgccacgataatatacagcgcgcgtaacgggtcgacattcggctggttggggaaattattttcccaaattttatagagaattaaatttctgaaggcccagttcttctgctgctcattcgcctgtaaacagcgcgctaatgaggactcaatatcgctaaccttctgctccattgaaacgccctcttccgccgtcagcacccgcagaagacactggatgtagtgatcgaggataacactgccacgattaagcgggagcgagcggaaatagtcctgcatctgcaataccagcgaggtttttaccttgctatccggcgcgatattcattaactcctgcgccagcacgccggtctgcaactgttcaagtaacgcggcatacacctgttccagttcgcccagcgcggcatcatcaattttggcaaatttctgtgcatacatgacgaatttaatcaacgcatagagcgcggcttccgtactgctgttggcatggttgatcagactcaggcaaaacagattgagtaacttttgctgcgctgggaataacggcgcagtattgaatgtctgctgaatgattgttttttcgctgagtgccattgcgtcaggatcgtttaaaatgcgggacgtcacctccgggcaggcaagactcagagagttacgcacctcatttttataggtatgatgcgcccgcgggaaagaggaacaggtatgacttaatgcctttgcgcctaacgttttttgtacccggcacagacggtcctcatccagataagggcaattccccagcgccgaaggcagcttaatttcgccccagtggctgttgttctttttcagcaggataatatggtcttgcgcgatggtacgaatcgtcgtgtctttactggcgagatattttttaaccgtcgtcttatccagcgtgattttccagcccttacaacagtggtcgcgacaggccgagccagaacaggaaaagcgggtgacaaaggcaggttcagtgacggtgatttctttcattacacaggctccggaattaaaaaaggcagctttcgctgccttgattgtgtaccacgtgtcggtgaatcaatcgccggattaacgcagtaaagagaggacgttttgcggaacctggttcgcctgcgccagaacggaggtaccggcctgctgcagaatctgcgcgcgagacatgttggaaacttcggtcgcgtagtcggaatcttcgatacggctacgggcagaagtcaggttgtttacggtgttgcccaggttggtaatagcggagttgaaacggttctgtaccgcacccaggtcagaacgtaacgtgtcaacctgtgccaaagcagcatcaattttctgcagcgggttttcggtggttgtagcagccgcttccgccagatcaggctgtgctttaaagttgtgaccttcggctttacttgcagcgtaagttttaccaccaatagaaacaacttcggttttgccgtctgcgccacccagtttgtttagtgcagttttggatgtaccgtcatctgcagtgtatttcgtagtattaatacttatggaaccatctttattttgagttgcagaatagtaatcatcgcctaccttaactgctaaaccaccatcaatagttttaccgttattatcagtataagacatcttaacaacagatgctgtgccggtaacacctgctgctgtcaatgcggctttagcctctgtcaaatcagcatttgcaacttgtacatttttcacatcctcagttgctgtcgcaggtagtccacctgtaagcggggaagtcgcaccgccagcaagagtcaccttaccgttcgtcttatcaacggaaacttcataatagccatctttaccagttccccccgtaacggtaactttggcgtaatattttccagtcgtatcatcaaattttaaatcgccatcaattttctggtcagtaccaccaagaccagtagccgaggctttaaaagtactattgtctaaagcaatcgtagtatcggcatatcctgtaacagttgcagccgtatcgctgaccttatatttttgttgcacattcagcgtatccagacccagggtctgagagttgatctgcttcagatcgatatcgatagtttcaccgtcgttggcaccaacctggatggtcagggtgttgtcctgcgccaggactttcacgccgttgaactgagtctggccggatacacggtcgatttcgttcaggcgctgggtgatttcagcctggatggagtcgaggtcagactgggagttggtgctgttagcagactgaaccgccagttcacgcacacgctgcaggttgttgttgatttcgttcagcgcgccttcagtggtctgcgcaatggagataccgtcgttagcgttacgggaagcctgagtcagacctttgatgttcgcggtaaaacggttagcaatcgcctgacctgccgcatcgtctttcgcgctgttgatacgcagaccggaagacagacgctcgatagcggtgcccagagcggactgggatttgttcaggttattctgggtcaacagcgacaggctgtttgtattaatgacttgtgccatgatcttttccttatcaattacaacttgatgttattgggctgttgcccacggtttctcaccgtaacccttgtatcggcacctgaatttcgaactttagaaaatttttcacttcccccgatctttttcttaggcggcgaaatagccgctttatgcatcattattccgcgcattatttttgcaaaattatcattaaactttgcctccagattgccgataacgcgcttaactactgtttgcaatcaaaaaggaagaaggcatggcttcaatttcatcattaggtgtgggatcaaacttaccgttagaccagttgttgacagacctgacaaagaacgaaaaaggacgcttaacgccaattaccaaacagcagagcgcgaattcggcaaagctaaccgcctatggcacattgaaaagcgcattagaaaaattccagacggcaaataccgcgttaaataaagcggatttatttaagtctaccgtggcgtccagcaccactgaagatctcaaagtcagtactaccgctggcgctgccgcagggacttataagattaacgtaacccagcttgccgccgcacagtcgctggcgacaaaaaccaccttcgcgaccaccaaagagcagttgggcgatacgtcggtcacgtcccggacaattaaaattgaacagccgggacgtaaagagccgctggaaattaagctggataaaggcgacacctccatggaggcgatccgtgacgccatcaatgacgccgacagcggtatcgccgccagtatcgttaaggtcaaagagaacgaattccagttggtgcttaccgccaatagcggtaccgacaatacgatgaagatcacggtggaaggcgatacaaaacttaacgatctactcgcttatgacagcaccaccaataccggcaatatgcaagagctggtgaaagcagaaaacgcgaagctgaacgtaaacggcatcgacattgagcgtcagagcaataccgtaaccgacgcccctcagggaattacgctcaccctgaccaagaaagtgaccgacgcgaccgtgacggtaacgaaagatgataccaaggcgaaagaggcgattaaatcctgggtggatgcctataactcgctggtggatacctttagctcgttaaccaaatataccgccgttgagccgggcgaagaagccagcgataaaaacggcgcgctgttaggcgatagtgtggttcgtactatccagaccgggattcgggcacaatttgccaatagcggcagtaattctgcgttcaaaacaatggcggaaattggcatcacccaggatgggacttccggcaaactgaagattgatgatgataagctgaccaaagtactgaaagataacacagccgcagcgcgtgagctgctggtaggcgatggtaaagaaacgggtatcaccaccaaaattgccaccgaagtgaaaagttatctggcggatgacggcattattgataatgcgcaggacaacgttaacgccacgctgaaaagcctgacaaaacagtacctgtccgttagcaacagcatcgatgaaaccgttgcccgttacaaggcccagtttacccaactggataccatgatgagtaagctgaataacaccagtagttatttgacccagcaatttacagctatgaacaagtcctgataacagaggtcaccatgtacaccgcgagcggtatcaaagcttatgcgcaagtcagcgtggaaagcgccgtgatgagcgccagcccgcatcagttgattgaaatgttgtttgatggcgcgaatagcgctctggtgcgcgctcgcctgtttttagaacaaggcgatgttgtcgcgaaaggtgaagcgttaagcaaagccatcaatattatcgataacgggctgaaagccggcctcgatcaggaaaaaggcggtgagattgcgacgaatctttccgagctatacgactatatgattcgccgtttactgcaggctaatttgcgtaacgacgctcaggccatcgaagaagtggaagggttactcagcaatattgcagaagcctggaagcagatttcaccgaaagcatctttccaggagtctcgttaatgacctcaaccgtggagtttatcaaccgttggcagcgtattgcgctgctcagtcaatcgctgcttgaacttgcgcagcgaggtgaatgggatctcttactgcaacaagaggtctcctatctgcaaagtattgaaacggtgatggaaaagcaaactccaccgggcattacgcgaagtattcaggatatggtcgccggatacatcaaacaaacgctggacaatgagcagctcctgaaagggctgctgcaacagcgactggatgaactgagtagtttgatcggacaatccacccgccaaaaatcactcaacaacgcgtatggccgtctttccggtatgttactcgtgccagatgcgcctggcgcctcataatattttcccgtctcgtatgaaaattcttccatactccagaggtcggctaaacgacttctggagcacggaagatgaaaaaccccacgttattgcagtacttccactggtattatcccgacggcggtaaactctggtctgagctggcggaacgtgctgatgggctgaatgatatcggtatcaatatggtctggctaccgcccgcctgtaaaggcgcctccggcggctattccgtaggctatgatacctacgacctgtttgacctcggcgaatttgaccaaaaaggaactatcgcgacaaagtacggcgataaacgccagttactgacggcgatagacgcgctcaaaaaaaataatattgcggtgctgctcgacgtcgtcgtgaaccacaaaatgggcgcagacgaaaaagaacgtattcgcgttcagcgcgtgaatcaggatgaccgcacgcaaatcgatgacaacatcattgaatgcgaaggctggacgcgctacaccttccctgcccgcgcgggccagtattccaactttatttgggactatcactgtttcagcggcattgatcacatcgagaatcccgacgaagacggcatttttaagatcgtcaatgactataccggcgatggctggaacgatcaggttgatgatgagatgggtaatttcgactatctgatgggtgaaaatatcgattttcgcaatcatgcggttacggaagagattaaatattgggctcgttgggtcatggaacaaacccactgtgacggctttcgcctggacgcggtaaaacatatacccgcctggttttataaagaatggattgagcatgtacaggcggttgcgccaaaaccgctgtttattgtcgcagaatactggtcgcatgaagtggataaactgcaaacgtacatcgatcaggtcgacgggaaaaccatgctgttcgacgcgccgttgcagatgaaatttcacgaggcctcgcgccagggcgcggagtatgacatgcgccacattttcaccggcacgctggtagaagccgacccttttcatgcggtgacgctggtcgctaaccacgatacacaaccgttacaggcgctggaagcgccggtagaaccctggttcaaaccattggcctatgcgctgatcctgcttcgtgaaaacggcgtgccgtcagtgttttatcccgatttatacggcgccagctatgaggatagcggcgaaaatggcgagacctgtcgggtcgacatgccggtgattaaccaactggatcggctgatcctcgctcgtcagcgttttgcgcacggtatacaaacactctttttcgatcatcctaactgtatcgcctttagtcgcagcggtactgaagagaatccaggctgtgtggtcgtactttccaatggcgacgacggtgaaaaaaccctcctgctcggcgacaattacgctaacaagacctggcgtgattttctgggaaaccgggatgagtatgttgtaactaatgatcaaggcgaagcgacgttcttctgcaacgcaggcagcgtcagcgtgtgggtcattgaggacgtgtgatgagcgttcccggcggcagagcgctgccgggaagcgaaattacggcagcggcgtcggcagcggcgtcggcagcggcgttttttctaacgcggcggcgcactccggcgtcggacgagcgacccgttgcagcgtcatgccatcatattccagggtattcccgtcgcgctcaatctcatagagctcacgcttaaccgtaacattggttaagtcatcggagagcatggtcagcttgcccggcagagcaataacgcgctgccactggcggcagtccagcgtatcgccttctttagtcaccaccaggctggcgatagcttcagggctcaccagcttacgttgcgggccttttgactgccagtacccttccagaccggccggcgcgggcgttttcaccacatcattatagttttccacctcggcgcatccggccagaaccagcaatgcgccaacgatcgctacttttttcatcattcatcctgcatcagaagaaagaagaattgtggcattaaagccctgacgccgccagcctttccaggcgctggccgcaatttgatccagtcggtattaccgcttattaggtgtaggcaaattctgtgatcggtgtagtatgcgcacttcttgtttcacaccttctgagttcagaggctaaacacatgtcatggcaacacttcaagcaaacctggttaattaaattctgggcgccggcccctgcggtgatcgcagccggtattctctctacctactattttggcatcaccggcacgttttgggccgtgacgggcgaatttacccgctggggcgggcaaattttgcagctttttggcgttcatgccgaacagtggggctactacaagctgattcatctggaaggtacgccgctgacgcgtatcgacggcatgatgatcctcggcatgttcggcggctgtttcgccgcggcgctgtgggccaacaacgtaaaactgcgtatgccgcgcagccgaatccgtatcgtacaggcggtggccggaggcattatcgctggcttcggcgcgcgtctggcgatggggtgtaacctggccgccttttttaccgggatcccgcagttctccctacacgcgtggttctttgcgctggcgaccgctatcggctcctggttcggcgcccgctttacgttgctgccgatatttcgcataccggtgaaaatgcagaaggtctccgcggcttcgccactgacgcagaaaccggatcaggcaagacggcgtttcaggctcggtatgctggtctttatcggcatgattggctgggcgttattaacggcaatgcatcagccgaaactggggctggcgatgctgttcggcgtcgggtttgggctgctgatcgaacgcgcgcaaatctgctttacctcggcctttcgcgatctgtggatctccggacgcgcccatatggcgaaagcgattattttcggcatggcggtcagcgccattggtattttcagctacgtgcagttgggcgttgcacctaaaattatgtgggctggcccgaatgcggtcattggcggactgctgttcggttttggcatcgtgctggcgggcggctgcgaaaccggctggatgtaccgcgccgtagaaggccaggtgcattactggtgggtaggcctcggcaatgtcatcggttcgaccatcctggcttactactgggatgatttcgcgcccgcgctggcgaccagttgggataaagttaacctgctgaatacctttggtccgctgggcggtctgctggtcacctatctgttgttatttaccgcgctgatgttaatcatcggctgggaaaaacgttttttccgccgtgcggggctgacgcctgctaaggaatctgtatgaaaaatatcgtccctgattaccgtctggatatggttggcgaaccttgcccgtacccggcggtcgccactctggaagcgatgccgcagctaaaaaaaggtgagatcctggaagtggtgagcgactgtccgcaatccattaataatattccactggatgcgcgcaatcacggctatacggtgctggatatccaacaggatggcccgacaattcgttatctgattcaaaaataagcgcatactcccgctgtacgttacggcgggagaccttttacggcataaccggcaaaaatctacaacgcataaaagaaatcagacaaggtcgtcttgtgcgccgtggcataaatctattatataacgtataccgttttaattttgtctgagccgatgaaaaatccagggttattttaatcaaaacataaaacaattattattttccgtctacgccataaaagactatcaggtatttatatttttactcactgacatcatcaggtgatgatttatttatgcacagcagaagccaaaaaaatgataaaaattattttcatctccattattggagtcgtctgtcttgccgctgcccgttattcacccgtcacagtggtcaatgcacatccgagcgccattgcccgctgtctcgctgataatctgtccccgtatgggtatatactggatctccatgaaacagatattccaggcattaataaagaatttaccgtgtattatcgcaacggcgcatatattgcaggaacattctggattgcaaactcaatgacaatagcatcagaacgaatagtaggaatgaatggcgttagtaaacaggcgtaccctatttttaataaatccctgcaacaatgtgcaacccgcttatcaataaaatgagcgcgcctcgcaaaaataagcccacataatcacgcactggttgcatgggcgtcgcgtcccccgccgctgacgtaggtaagcgcccgggagttcgctgcggatgtgttgtcagccctggcttaaacctgcatggacatgacttcctgatacgcggcgaccagcttgttgcgcacctgaatccccatttgcatagagacggacgctttttgcatatcggccatcacgtcattaagcgcaatgcccggctcacccagagtgaatttttccgcctgaacgcgcgccgccgcttgtctgtcgctaatacgatccagcgcagcatgtagctggccggcaaaactcaccgtcgactgcgagtgcgtgtcttgcccgcgcgcggccatcgccgtcgcctgtaactggctaataaccccttcaatcccctgtattgctgccatgctattcccctggatgattttttacgcagcagagattaccagtttgtcaataagataaaggcgttaaataacgataaaaaacctcggtttttagcgcatagaaaaattcgaaaccacaaataatgagaccgtcaatttttcgagtttgctgacccgggagtgagtcttgttccactttgcaaaaaacgccgtccacgatcagtcacgaggtgcgagatgagtgcgactgcatcgactgcaacccaacctaaacctctcgagtggcttaatcgcctacgcgcgaatccccgaattccgttaattgtggcgggttccgctgccgtggcgatcgtcgttgcgatggtgctgtgggccaaaacgcccgattaccgcacgctatttagcaacctttccgatcaggacggcggcgcgatcgtcgcgcagttgacccagatgaatatcccctatcgctttgccaatggcagcggcgcgattgaagtgcccgccgacaaagtgcatgaactgcgtctgcgtctggcgcagcaggggctgcctaaaggcggcgcggtaggctttgaactgcttgatcaggaaaaattcggtatcagccagttcagcgagcaggtgaattatcagcgcgcgctggaaggtgaactggcccggacgatcgagacgctggggccggtaaaaagcgcccgcgttcacctggcgatgccaaagccgtcgctatttgtgcgggaacaaaaatccccttccgcctccgtcaccgtcacactggaaccgggacgggcgctggatgaaggacaaattagcgccgtggtacatctggtttccagcgctgtcgccggtttgccgccaggaaacgtcactctggtcgatcaatccggtcatctgctcacgcaatccaataccagcggtcgcgaccttaatgacgcgcaattaaaatttgctaatgatgtggaaagccgtatccaacgccgtatcgaagccattctgtcgcctatcgtcgggaacggtaatgttcacgctcaggtaaccgcccagttggattttgccaataaagagcagacggaagagcactacagcccgaacggcgatgcgtcgaaggccactctgcgttcacgtcagttgaatattagcgaacaggtaggcgcgggctatcccggcggcgtgcctggcgcgctgtcgaaccaaccagcgccgcctaacgaggcgccgatcgccacgccgccgaccaatcaacaaaacgcgcagaatacgccacaaaccagcaccagtaccaacagtaacagtgctggcccgcgtagtacacagcgtaatgaaaccagtaactacgaagtggaccgcaccattcgtcacaccaaaatgaatgtgggcgatattgagcgtctctccgtggccgtcgtggtgaattacaaaacgctggcggatggcaaaccgctgccattgaccgccgatcagatgaaacagatcgaggatttaacccgtgaagcgatgggtttttctgataaacgcggcgatacgctaaatgtggtgaattcaccgtttagcgcagtggataacaccggcggcgaactgcccttctggcaacagcagtcctttatcgatcagttgctcgcggcaggtcgctggttgctggtgctggtggtggcctggattctgtggcgcaaagcggtacgtccgcagttgacgcgccgcgttgaagaagcgaaagcggcgcaggaacaggcgcaggttcgccaggaaaccgaagaagccgtggaagtacgccttagcaaagacgagcagctccagcaacgccgggctaaccagcgtctgggcgctgaggtgatgagccagcgtattcgcgaaatgtcagacaacgatccgcgcgtggtggcgctggtcattcgccagtggatgagtaacgatcatgagtaatcttagcggtaccgataaaagcgtcattttgttgatgaccattggcgaagaccgggcggcagaggtgtttaaacacctctccacccgcgaagtacaggcgttaagtacggcgatggctaacgtgcgtcagatctccaacaaacaactgacggacgtactatcagagtttgagcaagaagcggagcagttcgccgcgctgaatatcaacgccaacgaatacctgcgctccgtactggttaaagcgctgggcgaagaacgcgcctccagcctgctggaagatattctggaaacgcgcgataccaccagcggtatcgaaacgctcaactttatggaaccgcagagtgccgccgacctgattcgcgacgaacacccgcagattatcgccaccattctggtccacctcaaacgcagtcaggccgccgatattctggcgctgtttgacgagcgtctgcgtcatgatgtgatgctgcgtatcgcgacatttggcggcgtacagccggcggcgctggcggagttgaccgaagtgctgaatggcctgctcgatggtcagaacctgaaacgcagcaaaatgggtggcgtaagaaccgcggcggaaattatcaacctgatgaaaacgcagcaggaagaagcggttattaccgctgtgcgcgaattcgacggcgaactggcgcagaaaatcatcgacgagatgttcctgttcgaaaatctggtggatgtggacgatcgcagtatccagcgtctgctgcaggaagtggattccgaatcgctgctgatcgctctgaaaggcgccgaaccgccattacgcgagaagttcctgcgcaatatgtcccagcgcgccgccgatatcctgcgcgacgaccttgccaaccgtggcccggttcgtctgtctcaggtggaaaacgagcagaaagcgattctgcttattgtgcgtcgtctggcggaaaccggcgaaatggtgattggcagcggcgaggatacctatgtctaatgaattgccgtggcaagtctggacccccgacgatctcgccccgccgccagaaacttttgtgccggttgaggctgataacgtgaccttgacagaagatacgccggagcccgaactcactgccgaacagcagctggagcaggagctggcgcagctaaaaatacaggcccatgaacaaggttataacgccgggctggcggagggacggcaaaaaggacacgcgcagggataccaggaagggttagcgcaggggctggagcaaggacaagcccaggcgcagacgcagcaggcgccgattcatgcccgtatgcagcagttagtgagcgagtttcagaacacgcttgacgcgctcgatagcgttatcgcctcacggctgatgcaaatggccctggaggccgcacgtcaggtcatcggccaaacgccggcggtggacaactcagcgctgattaaacagatccaacaactgttgcagcaagagccgctctttagcggcaagccgcagttgcgcgtgcatccggacgacttacagcgggtggaagagatgctgggcgccacgctcagtcttcacggatggcggttacgcggcgatccaacgttgcatcacggcgggtgtaaagtctctgccgatgagggcgatctggacgccagcgtcgccactcgctggcaagagttgtgtcgcctggcggcgccgggagtgctctgatgaccacgcgcctgacccgctggcttaccgcgctcgacaactttgaagccaaaatggcgttattgccggcggtgcgtcgttatggacgtttaacccgcgccactggcctggtactggaggccaccggtctccagcttccgctgggcgccacctgcattattgagcgccaggacggccctgaaaccaaagaggtggaatcagaagtcgtcggttttaacggccagcgtctgtttctaatgccgctggaagaggtcgaaggcattctgcccggtgcccgcgtttacgcccgtaacgggcatggcgacggtctgcaaagcggcaaacagttaccgctcggcccggccctgcttggtcgggtgctggatggcggcggtaaaccgctcgacggactgcctgcgccggatacgctggaaaccggcgcgttaatcacgccgccgtttaacccgctacagcgaacgccaatcgaacatgtgctggataccggcgtacgcgctatcaacgcgttgttaaccgtagggcgcggtcagcgtatgggactctttgccggttccggcgttggtaaatcggttctgcttggcatgatggcgcgctacacgcgggcggacgtgattgtcgtgggacttatcggcgaacgtggccgcgaagttaaagattttatcgaaaatattctcggccccgacggtcgcgcgcgttcggtggtgatcgccgccccggcggatgtctcgccgctgctgcgaatgcagggcgccgcctatgccacccgcatcgccgaagactttcgcgatcgcggacagcatgtgttgctgattatggattcgctgacgcgctatgcaatggcgcagcgtgagattgcgctggcaatcggcgaaccgccagccaccaaaggttatccgccctcggtgttcgcaaagctgccggcgctggtcgagcgtgccggtaatggcatccacggcggtggctctatcaccgcgttttataccgtgttgaccgagggggacgaccaacaagatcccattgccgactcggcacgcgcaatcctcgacgggcacattgtcttgtcccgccgtctggcggaggccgggcactatccggccattgatatcgaggcgtcaatcagccgggcgatgaccgcgctcattaccgagcagcactatgcgcgggtacggctatttaaacagttgctttccagtttccagcgtaaccgcgatctggtcagcgtcggcgcctatgccaaaggcagcgatccgatgctcgataaagccattaccttatggccgcaactggaagcgtttttacagcaaggcatttttgaacgggccgactgggaggactctctgcaggcgctcgatttaattttcccgacggtgtgataaagcaggagggcgacgatcatggcacaacatggcgctctggaaacactcaaagatctggccgaaaaagaggtagatgacgcggcgcgtttactgggcgaaatgcgtcgcggctgccaacaggcggaagaacagctcaaaatgctgatcgattatcagaatgagtatcgcagtaatttgaacaccgatatgggcaacggcatcgccagtaatcgctggatcaactatcagcagtttattcagacactggaaaaggcgatagagcagcatcgcctccagcttacgcagtggacgcaaaaagtcgacctggcgctgaagagctggcgtgagaaaaagcagcgacttcaggcctggcaaaccttacaggaccgacaaaccgcggcagcgctgttagctgaaaaccgcatggatcagaaaaagatggatgaatttgctcagcgtgcagcaatgaggaaacccgaatgatcaccctgccccaactgatcaccaccgataccgacatgaccgcgggtctgacgtcaggaaaaaccaccggttcagccgaggactttctggcgctcctggcgggcgcgttaggcgcagacggcgcacagggcaaagacgcccgcatcacgctggccgatttacaggcggcaggcggcaagttatcgaaagagctactgacccaacatggcgagccgggccaggcggtgaagcttgccgacctgctggcgcaaaaagcgaatgcgacggatgaaacgcttaccgatctgacacaagcgcagcatctactgtctacgctaacgccatcgttgaaaaccagcgctctggccgcactgagtaagacggcgcagcatgatgagaaaacgcccgcgctgagcgatgaggatcttgccagtctgagcgccttattcgccatgctgcccggacaacctgtcgcgacgcctgtcgccggagaaacgccggctgaaaatcacatcgccttgccgtcactgttacgcggcgacatgccatcggcgccgcaggaagagacacatacgctctcttttagcgagcatgaaaaagggaaaaccgaggcgtcgcttgcgcgcgccagcgacgatcgcgccacggggccagcactgacgccgctggtagtcgctgccgccgcgaccagcgcgaaagtggaggtggatagcccgcccgcgccagtaacgcatggcgcggcaatgccgacgctcagcagcgccacggcgcaaccgctacctgtcgcctcagccccggtactcagcgcgccgttaggcagccatgaatggcagcaaacgttcagtcagcaggtcatgttatttacgcgtcagggacagcaaagcgcgcagcttcgattgcatccggaagagttaggtcaggtgcatatttcgctcaagctggatgacaatcaggcgcagctccagatggtatcgccgcacagccatgtccgcgccgcgctggaagccgccctgcccatgttgcgcacccagttggcggaaagcggcattcagttgggacaaagcagtatcagtagcgaaagctttgccggacagcagcagtcttcgtcgcaacaacagtcttcccgcgcccaacacacggacgcgtttggcgctgaagatgacatagcgttagcggcgccggcctcgcttcaggccgccgcgcgcggcaatggcgcagtggatatcttcgcctaacgccagaggtagcatgattatccgcgtcttttccacgctttgtcgtggacaggacacgggataatcagccaataagcagtaccgaaacaggaagcccgtatcagatgactgactccgcgattaacaaaaagagcaaacgctcgatttggatacctttgctggtgttgattaccctcgccgcctgcgcgaccgccggttatagctactggcgtatgcagcagcaaccgaccacgaacgctaaagcggaaccggctccgccgcccgcgccggtattttttgcgctggatacgtttaccgtcaatctgggcgatgcggatcgcgtgttgtatatcggcgtgaccctgcgtctgaaagacgaagcgacgcgcgcgcgattaaatgaatatctgccggaagtgcgcagccgtctgctgttgttgttttcccgtcagaatgccgccgagctctcaacagaagctggcaaacaaaaactgattgccgccattaaagagacactggccgcgccgctcgttgccggacaaccaaaacaggtcgtcactgacgtgctttatacagcttttattctgcggtaacgatatgggcgatagtattctttctcaggctgaaatcgatgcgctgttgaacggcgacagcgacaccaaagacgaacccactcccggtatcgcaagcgatagcgatattcgcccttacgatcccaatacccagcgtcgcgtcgtgcgtgaacgcttgcaggcgctggagattattaacgagcgtttcgcacgccagttccggatgggattatttaacctgctgcgccgcagcccggatattaccgtgggtgccatacgtattcagccgtatcacgaatttgcgcgtaacctgccggtaccgaccaacctgaacctgatccacctgaagccgctacgcggcaccgggctggtggtgttctcgccgagtctggtgtttattgccgtcgataacctgttcggcggcgacggccgttttccgaccaaagtcgagggccgcgagtttacccatacggaacagcgtgtcatcaaccgtatgctgaaactggcgctggaaggctatagcgacgcatggaaagccattaatccgctggaagtggagtatgtgcgttccgaaatgcaggtgaaatttaccaatatcaccacctcgccgaacgatatcgtcgtcaatacgccgtttcatgtggagatcggcaatctgaccggtgaatttaacatctgtctgccatttagcatgatcgagccgctgcgtgagctgctggtgaatccgccgctggaaaactcgcgccatgaagatcagaactggcgtgataacctggtgcgccaggttcagcactctgaactggagctggtggccaattttgccgatattccgttacgtctttcccagattttgaagctgaaacccggcgatgtactgccgattgaaaaacccgaccgcattattgctcatgtggacggcgttccggtactcaccagccaatatggcaccgtaaacggacagtatgcgctacgcgtagaacatttgatcaacccaattttgaattcgctgaatgaggaacagcccaaatgagtgacatgaataatccgtccgatgagaatactggcgcattggatgatctgtgggctgacgcgttaaacgagcaaaaagcgaccaccactaaaagcgccgccgacgcggttttccaacagcttggcggcggcgatgtcagcggtgctatgcaggatatcgatctgattatggatatcccggtcaaactgaccgtagagctgggccgcacgcgaatgaccattaaagaactgctgcgtctgacgcaggggtcggtcgtcgcgctggacgggctggcgggcgagccgctggatatcctgattaatggctacctgattgcccagggtgaagtggtcgtcgtggcggataaatacggcgtacgtatcaccgatattattacgccatccgagcgtatgcgtcgtttgagtcgttaatgatgaagacagaagccacggtttctcagcccaccgcgccagccggatcgccgctcatgcaggtgagcggcgcattaattggcattattgcgctcattctggcggcggcctgggtgattaagcgtatgggattcgcgccaaaaggaaatagcgtccggggactgaaggtgtcagccagcgcctcgcttggcccgcgcgaacgcgtggtgattgtcgaggtcgaaaatgcgcgcctggtactgggcgtgaccgcctcgcagatcaacctgctgcacaccctgccgcccgcggagaatgacacggaagcacccgttgccccaccggcggatttccagaacatgatgaagagcttactcaagcgttccgggagatcctgatgcgccgtttgttattcctttctctggcgggtctgtggctttttagtcccgccgccgctgcgcaactgccggggcttatcagccaaccattagcgggcggaggccaaagctggtcattatccgtccagacgctggttttcatcacctcgctgacgtttctgccggcgattttactgatgatgacgagcttcacgcgtatcatcattgtttttggcctgttgcgtaacgcgctgggcacgccctcggcaccgccaaatcaggtgttactcgggctggcgttgtttttgaccttttttattatgtcgcccgtcattgacaagatttacgtggatgcttaccagccgtttagcgagcagaaaatttctatgcaggaagcgctggataaaggcgcgcaaccgttacgcgcgttcatgctgcgccaaacccgcgaagccgatctggcgctgtttgcccgtctggccaatagcggtccgttacagggaccggaagcagtaccgatgcgtatcctcctgcccgcttatgtcaccagcgaattaaagacggcgtttcagatcggttttacgattttcatcccttttttgattatcgacctggtgatcgccagcgtattgatggcgttggggatgatgatggtgccgccagcgacaatcgccctaccgtttaagctgatgctgtttgtgctggtcgatggttggcaattgcttatggggtcgctggcccaaagcttttacagttagaggcgcaaaatgactcctgaatccgtcatgatgatgggcaccgaggcgatgaaagtcgctctcgccctggctgcgccgctgttactcgtcgcgctgattaccggcctcattatcagcatcttgcaggccgcgactcagattaatgaaatgacgctgtcgtttatccctaaaatcgtcgcggtattcatcgcaattatcgttgccggcccgtggatgctcaacctgctgctggattacgtgcgcactctgttcagcaatttaccttatatcatcggataaacagaacgatgatccaggttacaagcgagcaatggctatactggctgcatctctatttctggcctttgctgcgcgtactggcgctgatttcaacggcgcccattctcagcgagcgcgctattcccaagcgggtaaaactggggttgggaataatgattacccttgttatcgcgccgtcgctaccggcaaacgatacgccgcttttttctattgccgccttatggctggcgatgcaacaaattctgatcggtattgcgctgggatttaccatgcaattcgcctttgcggcggtgcgtaccgcaggtgagtttatcggtctgcaaatggggctttcctttgccaccttcgtcgacccgggcagccacctgaatatgccggttctggcgcgtattatggatatgctcgccatgctactgtttctcacctttaatggccatttgtggcttatttcgctgctggtcgataccttccacaccctgcccatcggtagtaacccggtgaacagtaatgcatttatggcgctcgccagggccggagggctcattttcttaaacggactgatgctggcattgccggtcattaccctcctgcttacgctcaacctggcgctggggctattaaaccgcatggcgccgcagctctcgatatttgttatcggtttcccgcttaccctcaccgtcggcattatgctgatggccgcgctaatgccattaattgcgccgttttgcgaacatttattcagcgaaattttcaatttgcttgctgatattgttagcgagatgccgataaataataacccataatttttatcctgttttactaaggtttatccgaaaataaattttaaaaaacattcaccaggatatatccactgccccttatttgtttttacttcactcacataacgcaacattcactttactttaagatgattcctggcaaattatatgtaactttacgggatagtaagttcgcctgaaaaaccgcgtaagcgttgtctaaggtgactattcgtgttccgtctgattatggtgagttattcaggtaaggggaattatcgttacgcattgagtgagggtatgccatgtcaacgattattatggatttgtgcagttacacccggctagggttaagcgggtatctggtcagcagaggggtgaaaaaaagggaaatcaacgacatcgaaaccgttgacgaactcgctatcgcttgtggcgcgcatcagccttcggtggtgtttattaatgaggactgtttcattcatacgccttcagacagtcaacaaataaagcaaatcattaatcaacatcctgacacgttatttattgtttttatggcaattgctaatgtgcattttgatgaatatttattagtaagacaaaacttattgattagctcgaaatcgattaaacctgactcgctggatacccttcttggcgatattctgaaaaaagagtcgggtatttcaggaaccataaatttaccaacattatcgttaagtcgaactgaatccagcatgttgcgaatgtggatggaaggtcagggaaccattcagatttctgacagaatgaatattaaagcaaaaacagtatcctcccataaggggaatataaaaagaaagataaaaacgcataataaacaagtgatctatcacgtagtacggctgacagataacgtcactaacggcatttttgttaacatgcgctgagacatccggactggcaatgtacctccagtccggctcaattagtcctgctccgccttctcgacaaaaataccatcctggtgacctgactcattgaagaaccagatgccgagcgggtaatcctccagcgaaaccaggtacattgtgccttcactaaattcttccactgccagtaccacgcccggtcggcggggaccgccgtccgttttaacggttacccgatcattcaccttcatcattttcctcctgtcgctttgtgccagtgtagaacaattttctgcgtctgacagcgccttgccggcgtgtttgctggttttctcaacggtctatacttaggctgtcaggaacccgtgaggtggtgaagatgaaaacggcaaaagagtacagtgatacggccaagcgcgaagtgagcgtcgatgtagatgcgctactggcggccatcaatgaaatcagcgaaagcgaggttcaccgtagccaggaagatcctgagcgggtgagcgtagacggacgggaatatcatacatggcatgaattagctgaagcattcgagctggatattcatgattttagtgtaacagaagtaaaccgttaaaaatggccgaaaaaaatcccggccctacgggtcgggatcaaacttgcttatgcaagaagcacttgaaaattcgttacaccaggaaatctgatgtgagatttaccttatctgcaatttttttgcatgacaagtaaatattttttacatgaatgattaagcacgctaatagttcggtagcaaaagtgtgacaacgcatgtgctgcctggaagcgacgggatcggttccagttagcgttcgacttctttcgggtgtgctttaggacttttcctggaaataagcccgccgttgcaacggaaaatgaggaaaaaatgctctcaatccatgaccccttgctgatttttaccgatctggacggcacattgctgaacagccacacttttgagtggcagcccgcggccccctggcttacacgcctgcatgaaagcggcgtgcccgtgatcctctgtagcagtaaaaccgcggctgaaatgctccagctccagacgacgttaaatctacagggactgccgctgattgcggaaaacggcgcagtgatccaactggacgttcattgggaagaccatcccaactatccccgtctgatagccggtatttctcacaacgaaatccgcctcgtcctgcataagttgcgtgaaaaggaacagtttaagttcaccacgtttgatgacgttgacgatcaggtgataagcgaatggacaggcctaaaccgggcacagtctgccctaacccgtctgcatgaagcgtcggtgtcgctgatctggcgcgatagcgatgaacgcatggcgcagtttgtcgcccgtttaaatgacctgggactgcaatttgtccatggcgcccgtttctggcatgtgctggacgcctccgccggtaaagatcaggctgccaattggctgattgaagcatatcgtcggcagtggcgcgcgcgtcctctgacgttggggctaggagacggccccaatgatgcgcccttactggatgtgatggattatgcggttgtcgttaaagggctaaaccgggagggcgtacatttgcgtaacgacgatcctcagcgcgtctaccgtagccagaacgaagggccggatggctggcgcgaaggaatggactatttcttttcccgctcctgagtcgcgtcgctggcgcaaatacggttacgtccggactgtttggcgtaataaagccgtttgtcggccagcgactgcaactgctcaaaatcatagtcgccgtattcctccgcgctactgatccccattgacgcgctgatacgaagcgtcgtgcttttcgtcaccagaatctctttgtcattaatgcgctggcgtatgcgttcggcaatctgcagcgcctgcgctttcgtcgcgccgggcagcacgatacaaaactcttcgccccctacccgtccggcgatgtcgtgcgctcgaatggtgctgccaatgagcccagcggcatgggacaacacgcgatcgcctgcctgatgaccaaagcgatcgttaacgcttttaaaataatctaaatccagctgtatcacagaaaatggctggcgggcttcccggtagcgctttgccagcctggacgctttttcaaacagcgcgccacggttatatagccgggtcagcggatcgtgccatgcctgccattgcagcgaattttgcagaacaaacatgtttttgaccatatgtcgaataacgccccaggagatcaacagcatcgccgtaaaaagcccccataacagcgtcagcgcgatactaatgctgccaaaattcccttgtatgccttcacgtaatgtatgcacgcgcagcaggatgccatcaaaatgatccagccgctcccagcttacataatgcgttcctaaacgcagcccgcccagggtatctttttctatttcacgcgccagtaaggcgcgctcacggtcatttaacgtattcgcggtttgttgttccggcgcggagtccgtcaacaaacggagatggttatcgtatagctgatattccccttcaatatccttttcggccgcatcgcgcaggaaccgctgtaatgacgcgacgggaatatccattgccagtacgccataccagtaattatcgtgatccagcggtagactggctgtcacttttttctgctcgtcagtaacatagggctgtgcggaggtaaaccaccgcacgccgcgctgtgagttacgccgttggctttgctcgataaaccatggctgagtcacgtactgatagtaacgggagacaatatcgctaccgtacgccgtagggagagttgagaggtaaaaccctgagcgagaaacatacatcgtctccagcgccagcatggctgatgagcgcgccagacgcgccagataccctaactccagcgtggcggttaattcatttgccaggtcacgactctcccgcgaaagaagcgtcgtccgggcgacaaattgatcggaaacgccatataacggcaatgtccgccgcttatccaactccaattgccagaaatgtctgacgcgtcgttgctcaaactgcgtcaccgcgctttgcaatgcggaaaaagccagcggcgccaccagcgcttcatgcataccgttgcgtaaaaagatcaacctgtccatgttgaattgcagttggcggtcaaggacattcgcgacgctccccagatgattgcgctgactggcgacatacgcgtctttcagtatcatcacttccctccaggtaagtagcgtcgagaacagcatcacgatcagaaaacaggtgttgacgacatgaccgggaccaaaacgccgcgccagctttttaaaccagccttgattgtctaacagtgtttcgtgcggcaccctggtaactcctggttattgatacaactccccctgatggcttacggtagccagacctcatcaagggataccactcaatcctggcataaccaggtagcagcatgtcgcagcgcgacgactctttttctccacagcaaaacgcccggcattaaccgggcgttttgtcatcgggcttcgtcccgcacgcgcctttccttgcctggcacgagctcattctcatggaatgcctcccgctttacgccaaaaccatcataccagcgacactctaccattccgctggaataaccggtgacgatcatccggggcccaccctctttcacggtaacttcctcactgacagaaaagaccatacctgcctcctgtatcagatgaaacgctttcaccttagacgaggatggacaattttgcataattcattgtagaaaatcagtgcgaaacaccgcgaattttcgccacacctttcaccagcgccaccacaatggcgccgataataaagccgagcaccagattcagccccgcagggatcgtatgcgccatgaaagccccctgctgctgcgcaaaatgttcaatggcatggtgtagcggcgcaataccgtgtacgacaattccgccgccaaccagaaacatcgccagcgtaccgacaatggataatgctttcattaaccagggcgcgataatcagtaatcctttaccgacgccctgcgccagcacgctacgcttttccgccagccagtaccccatatcatccagtttgacaataatacccaccaggccatacacgccaatggtcacaaccaacgcaatccccgccagtaccaacacctgattaagcagcggcgcctgcgcgacaatccccagggtaatggccacaatttcagcggacagaatgaaatcggtacggaccgccccttttactttatctttttcaaaggccaaagggttttgcgcagccagcgcctcaagacgtttttgccgctccgccgggtcttctttgtgttttcgcgcctcaaaggtatgcaggactttttctaccccttcaaagcagagaaacgcgccgcctaacattaataaaggcgtaatggcccacgggataaatgcgcttatcaacagcgccaacggcaccagaataaccttgttgattaatgatcctttcgccacgctccataccaccggcagctcgcgattagcgcgaacgccggtcacctgctgcgcattgagcgacaggtcatcccccagtacgcccgcggtttttttcgcggccaatttgcccattaccgaaatatcgtccagcagcgtggcgatatcgtcgagtaatgtcagtaagctacttcctgccaaaatgatttcctcggtcttttcttctaagacgttaagtatgtagcaaaacgcgcaatgccgaaaccggcggcgcgggtcaacgcctttttattccaaaaggacaattataatgctcgccagcataataattttgacgtttactatattcaccctttttatttcaccgtgagtgattatgcgtttccggcagttattacctctttttggcgcgctttttgccttgtacatcatttgggggtctacctattttgttatccgcataggcgttgaaagctggccgccgctgatgatggcaggcgtacgttttctctcggcggggatgttgctcatggcgtttttgctgttgcgcggcgaaaaacttccgccgctgcgccagaccatcaacgccgcgctgattggtctactgctgctggcggtgggtaacggtctggtgacggtggcggagcatcaaaacgtgccatcgggcattgctgccgtcgtggtcgccactgtcccgctatttacgctgtgctttagctacttttttggtattaaaacgcgcaaattagaatgggtggggattgccattggacttgccgggattattctgctgaacagcggcggcaacttaagcggcaatccgtggggcgcgattttgatcctgataggttcgatgagctgggcatttggttccgtttacggctcgcgcatcgccctgcctgtgggcatgatggcgggtgcgattgaaatgctggcggcgggcgtggtattgctttgcgcggcgtttctttccggcgagaagctcgccacgctgcctggtttatcggggtttatggccgtcggctacctggcgttgttcggttctattatcgccattaatgcctatatgtacctgattcgcaacgtcagtccggcgctggcgaccagctacgcctatgtgaatccggttgtcgccgtgttacttggcactggcctgggcggtgagaggttatcgcccgttgaatgggccgcgctgggtgtgattgtgtttgccgtagtgctggtgactctgggtaagtacctgtttcctgtcaaggcggtggtcacgccgtgtaaaacggaagattcacgccagtagatgaatcccctgggtgtcgatctgcgcgctggcgccgccgccgcagatccactcttccaggcgctccgccaacgccgcgtcgctcaatttcgctcgcccgcgcaaggcgcactcccagacgatcagtacccgccagccaagcgcctgtaaacgctgaatatcgcgctcatcgcgctcaacgttcttaccgattttttccagccagaaagccgttcgcgtggccggcactttgaacagataacagtggtgatgatgccaaaagcagccgtgagtaaaaatcacacaatcataatcattcaccacaaagtccggcttgcccggtaatgtcgcgtcctgagtatgaaacgtaatcccctgtgcgcttaacaggccagcaagacgtttttcaatagccgtatcgcgggtcgctatcgcgcgcatatttttactgcgcgtggctttatcgtgaacgtccgccatctaccgtctctctctgacgcaacgtcaccgcctggtgaattttgggttccaacagctttgctaccgcagcaaataccggcaccaccacggagttgccaaactggcgataggcctgcgtatccgagacaggtatcctgaactggtacgtttgcggcgcctcaaatcccattaaacgcgcgcactctctcggcgtgagtcggcggggacgatgttgttggttgccagcatcgtcgaaattcacttcgcctttcgccatatcccaaccacgatcgatcagaatttcggcaccatctttgtagtagcgagcagataacgtgcgcgccacactttccggattgtcaggataaaccatgccatagccaaaaccgtttccccgcgcctggtgctttttcgcgtagcgatataaatatttccacagcaccggcgtcaggatatatttggcttcgacgacgggctccagcagttctgccagcgtcggacggcgcggtggataacaacgggcgatattgcgtaacgtaaaatcggttttcaggtttaaatcgcgacggaatcccaccaacacaatacgttcccgatgctgaggaagaaagtgctgcccgtcgataattttcggatcgtccgggccattgtcagcggcatccgccacgtcatatcccagttcatcaagcgtttgcataataatgcggaaggtgttgccctggtcgtgacttttaaggtttttcacgttttccagcacaaacagcgcggggcggcgggcgtcgataattcttacgacatcaaaaaataacgtcccctgagtctcgcaggcaaagccgtgggcgcggcccagcgcatttttcttggaaacgcccgccagagaaaatggctgacagggaaagcccgccagcaggacatcatgttgcggaatatgctggcgaatgtgttccgccgcctcatcatcgctgaccccttcccggtggctcaatgtgatatcgcggatatcttcattaaagcgatgttgcagcggatcgcaaaaatagttcgctttatatgtccgtaccgcgtgcttattccattcgctggtaaacacgcactgtccgcctatcgcttcaaatccgcggcgaataccgccgatgcccgcgaagagatcgataaaacgaaaggcgtaatgtggatgatgcgctggcggcgtcggcaactctgttttaagacaggtgagttcattgtcgctcaagcgatgccatgccgcgttcatcattacgcgcttgaagatggccgggctccagtgctgttcgcccaggccgttaaggtgcgccaccagcgttttaacatcgtagatttccagcaattgactcagcatcgcctggagctcgcttccggcgtcgtcggcgatgaggttccgggcgtgtgttactgaaatattttcctgcatacatttaaccggccaaaaataattgccgacagactaacataaaatgacgcggtttacgtttcagcgacaggggttactgatgcgtagcaaacatctggatgaccgcatcatcccgtgtttcatagtcgcctttcagctcagcgctcagtttcgccatgtacgacaccagaaaatccgcattacgctgcgccaggtacttgccccgttcggtctgcatcgtcagcggcagtttcagcagtttggtttgaaaatggtcgagcgcgaattgcttatcgttaagaggccgtctgtcggcaaagggatcgtcggcatcaaataacgcgacgcccagcgcgccggagaccgcgaagacccgcgccagaccaatggcgcccaacgcctccagcctgtctgcatcctgcacgatttttgcctctggcgtggtaggcgcaatttttgcgctgaagctatgcgcttcgatagcatgacaaatgcccgccagtttttctgccggaaagtcaggaaaatcccgcagaaaaatacgccgggtttctgccgccgccagaatggaagaacgatgccgctgcggatgatttttcgccaggctgacgatgtcatggaaataacatgccgatagcaccaccagccagtcgacaggactgttttcccccagcgtttgcgcggttgcccaaacacgacgaaaatggaagatgtcatgggcggcatcctgttcctgatggtggtgacgtagccagtcttcaaactgcgattgccagtatcctgagtccatacgccctctctttatagcagaccatttttattacatgcctgagcacagggttcgctatcctgacatatccgccaccactttacatccctgcttacttgcgcgtttctggcttagtgtcggcgggataagccctgtttttgcgaggccgggtataccaggcaatactccccagaataagccagacgacgcccagcgaaagcgcgttaagccatttttccgttgcgctgccaggagtgctgattgggccgagaaccggctcggtttgtatggcggacatcagccacacgcaacgcgccatcgcccagatgaagtagccgcaaaaggtataaaaaacccataacgctaatttgccgcccatgctacgggtggcgttgtcctccctggtactcaaactttactccgcttttgtgatgtaagtcatatgacattaattacattataatgtgatattaatcacatttcgactatggaatacctcatccacctgttctggctattcattccacaaatagtttattctcagttaatgttacgtctggcgctgaacctgctgttaaataagggaatggtgattgaatcgcactctgatgcagaataacctataaccagaacaacttatttttacgcaccgcgatagcgttttattttatcagcattaagtgtcagaatgattcggttattagccttttatcatttattttatcattacccacattaccggcatttatgccggttttttttatgttttttcataatcaaagcatcaaatacatataaaaaacaaattatattcacaccaacaaccatcaaatcaaaaaacataacccattgataaaaaatgataattatagaatatatattcttagttacttatatagtctgtattataaaaaaccaaacagaaacaaattgaaatatttcaaatacctttgttacatgttattttttaaattccatgaacttcatagaatagtatcaatttgtagttttgttgaagtggctacatattcatataaattattatcataagggaatacataatgaacagaaaagttctggcactgcttgtcccggcgttattagtggcaggcgcagcaaatgcggctgaagtttataataaaaatggcaacaaactcgacctgtacggcaaagttgatggtctgcgttacttctctgacaatgcaggcgacgacggcgaccagtcctacgcccgttttggctttaaaggcgaaacgcagattaacgatatgctgaccggctatggtcagtgggaatacaacattaaggtaaacaccaccgaaggcgaaggtgcaaactcctggactcgtctgggctttgccggtctgaaattcggcgagtacggctctttcgattatggccgtaactatggtgttatctacgacattgaagcctggaccgatgcgctgccggaattcggcggtgacacttatacccagaccgatgtctatatgctgggcagaaccaacggcgttgctacctaccgtaataccgacttcttcggtctggtggaaggcctgaacttcgcgttgcagtaccagggtaataatgaagatcctggcgcaggcgaaggaacagccaacggcagcgatgcagatagtggtactcgcaaactggcccgtgaaaacggcgacggtttcggtatgtctacctcctacgactttgacttcgggttaagcctgggtgcggcctactcttcctctgaccgtacggacaatcaggttgctagtgggcgtggtgatggccatcattactatggcaatagctatgccggcggtgaaactgccgaagcctggaccgtaggtgtcaaatatgacgcctataacgtatacctggcggccatgtacgctgaaacccgcaacatgacctattatggcggcggcgatggcggtgatggcggtatcgctaacaaaacccagaactttgaagtggttgcacagtatcagttcgatttcggtctgcgtccgtccatcgcctacttgcagtctaagggcaaagatttaggcggccaggatatggatagccgtggtaactatcgttacaccgacaaagatctggttaaatatgttgacgttggtatgacttactacttcaacaaaaatatgtccacctacgttgattataaaatcaacctgctggacgaagatgatgacttctacgcaaacaacggtattgcaaccgatgatatcgtaggtgttggtctggtctaccagttctaagacgctttatgttattcaagcccgtgcttagcgcgggcttgttattatagggtaagaattaaataacggataacggcgcaaagacaggttgacctggtttcatcggatagatgaagacaacatcgcttttttcaggcgctgtctgcaagagaaataacacttttggggaaaggaaaatgccactatagatgatggatgtcagcgtctatagatgataatcatccgggcataaaaaagctcctgtacggagctaatatgaattattttctaaaatctggcggaacctgccctgagcgaatgtataatccaacattatcaaaagtgatcatggttgacttacaaaaaatacatttcgcgccaaacgggttttgctcagtaacatcgaatgtcgatgttctgtattgtgaaccatggcaacatggacaccggaagtgaattttattagtaatatcagttgccttaaagcgccacaacgttgaccgctgatggaccttttggtccctgctctactgaaaactccacttcctgattttcattcagagtgcggaattcattactttgaatggctgaaaaatgcacaaacacatctttgctgccatctttaggcgtaatgaaaccaaagcccttttcagggttaaaccattttactaaaccagtgattttcgtcgtcataatattgttacctttcgaatgagcccttgggcaaaatggcctgaagaaaattatcagagagaaaaaaacctaaaggagatctcaagaggaacaaatgatgagaaatattacaatcactacttcagataagtttgtatcaaaccgcacaaccattaacgcatggttaactgaacatagcaagctttagttttgttaaaaaaatattaattgttttttagcattatcacgctgattgccatactctttttattcatgcctgtcgctacggctgaaacctggcgtaaataagtgacgtctcacaacgcctgccgggcaataaacgcgccacattttctgatgtcgtaaaccaggatacatgcgcctcatcgtgagaggttcctgtgatcttgtgcgaccaaaaccggttagagaacggggatgatttggcaaccatctcaggcattgatcgcacaagttacttaacacgcagtagatcagagtatcttgtggtgtaccgaggcgaaagcatttctcgcttcatagcccactgttgcgacatcccctgcccggcgaagtacagcgtccccttcccgtcttttgcgttaagatggtccagtacttccatcaacttcgcactaccggcgcgcggcgcgttatcgtcgaaaaggttgagttgcgctacgccctgactgaagaagtcacccagcatcacccccgctttctggtagcgatggccgtcgcgccatattttatccaggcatttcacagccgcattgataatgtcacgtgaatcctgcgtgggggtgagaagcgtcaccgcggcgctgttaccgtagtagggctcgttcagggcaaagggtgatgttttgacgaatgttgaaatgaaacggcagtactggtgctcgccgcggagtttttctgccgcgcgcgcagcgtagctgtaaacagcctggcgcatttcctcatagtctgtgacccgctcgccgaaagagcgactacaaacgatttcctgctttgccggcgcaaactcttcgagctccagacatggctctccgcgaagctctctcacggtacgctccagcacgacattgaagtgtttcctgatgatccaggtactttgttcagagagatcgagagcagtcttgatgcccagggcattgagcttcttactgatgcgcctgccgacaccccagacatcctccacgggtatcagggccagcagccgacgctggcgatcgatgttcgacaagtcaaccaccccgtcggtctggcgctgccactttttcgcagcatggttagccagcttggcaagggttttcgtctgggcaatgcctacaccgacagtcaggtgcgtgcgcttcaggaccgtcgctcttatctcgcgcccgaaatctgtcagatcccggcagtttcgtacccccgtcagatcacaaaaggcctcatcaatgctgtaaatttctacccgcggcaccatctcctcgagtgtggtcattacccggttcgacatatcagcgtaaagctcgtaattactgctgaagcaaacaacaccggatcgccggaagcgttctttctgtttgaagtatggctcacctggtgcgataccgagctgtttcgcctcggcgctacacgcgataacgcagccatcattgtttgataacaccaccaccggtcggccacataaatcaggacgaaagaccgtttcgcaggaggcgtaaaagctattaacatcgcagagcgcgaacataatcaactgaccgctttaatgataaaggtcaccaccccgaatatgtcgagcgtgtcttcactgccgacaggtataggtcgataggcgccgttcatggggattaactgcactgtcgggcgcaactgcaaccgttttacggtgaactctccttcaattgccgcaattacaatgtcaccgtggtcagcgttccgtgagctatccaccaccagcaggtcaccgtcgctgatgcctgcttcaatcattgaatcccccgaggctttgacaaaatatgttgagctgggatgagaaacgagcaactcattaagatcgatacgctgctcaatgtagtccgccgcggggctggggaatccacacggcactaagtaactgaaaaatgggagaggaataatttcgcgcaactctgtaggtctgaaaaattccataatccatacctcgaatactgtttttatatacagtagtgttatttgaacatgcgcgcaagataccggagtcgctacgactgtttaaatcttcgtcgcttcgtttgtaagtttctctctcagttcaaattatgggttttgtaaattttccggttgtattgtcatgtgcgcatatttaagccagcctggaggccagattttctgtacagcgtcgacagtcccgcagcgtaagttatcgccacgcgccagcgcgtttccctcacagcaattaatcttctgcccggcgcccatgtctacaggggaacatgtcgggcaacaggccgggtgcgacgatgaccgaggacgacggcgttaagtcgccgcgagtgacatcaatattaatccagatggggtacggcgaaagagcggggcagaaaaccaggagttgacttatgatcgaaaagtaaaaataacaccatccctggccccctcttctggcagaaaaagcataagatggcgatacgtttttcacgtaatattctaacagaatattctaagtgtattctaagtgtgagactgatcgctgaaagaagatgagctaagtgtttgaattgtggcggagagagggggatttgaacccccggtagagttgcccctactccggttttcgagaccgtcccaatattcttatttaacattaacttatctaataacacgagaaaaaagtagcatttttgtacgcagtattttcagaaagttagcctacttatcaaaatcattttctcaccatgatagactattttttaaacaaaaccatctcctttattgacttcccacaacaacatgcgccataacatcttcgtggcatctggtggtttccgtccttaatcagttatgggattcctacaggttcaccggatgccacaaccttccctcatgcttctagttagcgcggtaatcccgttttttaactcccttccggttagccgataacagaatccagtacagcccgtgtatcgacagccccacatcataaataatcgctacctgctgtcgcggtattcctgccccaatcagacgcccggcctgcgcccattgctcaggtgataactttggtcttcgcccgccaatctcccctgtccccctgcaatacaataaaaacatatcgtataagaagtataaaatacttattcaaaaatgtaattttaagccccccctaaccaagtaaaaactatcgtttcagatagctatggcacgaaaatacggtagcaaatcttcatacaaaaatcttccaatttattaaactaaggttaaaacccgatatcttatcaatctcaaatcatggtatgttatattaatagcgtaagggttgaaaaatgttttctcgagtcagaggttttctttcatgccagaactattctcatactgcaactccagctattactctgccttcatcaggtagtgcaaactttgccggagttgaatatcctttattgccattagatcagcacacccccctactttttcaatggtttgaacgaaacccaagcaggtttggggaaaaccagatcccaattattaatactcaacaaaacccctatctcaataatattatcaacgccgctataatagaaaaagagagaactatcggggttttagttgatgggaattttagtgctggacaaaagaaagcattagcaaagctggaaaaacaatatgaaaatataaaggttatctataattccgacctggattatagcatgtatgacaagaaactatcagatatttatttagaaaacatcgctaaaattgaagctcaaccagcaaatgtcagagatgaatatctgcttggtgagataaaaaagagtttaaatgaagttttaaagaacaatccagaggagtcccttgtttcgtcccatgataaacgcttgggacatgtacggtttgatttttacagaaatctttttttattaaaaggaagtaatgcttttctggaggcgggcaaacatggctgccatcacctgcaacctggaggtggctgcatatatcttgatgctgatatgttacttacaggtaaactcggcactttgtatttacctgatggtattgctgttcatgtaagtcgtaaaggtaatagcatgagtcttgaaaatgggattatcgccgttaaccgcagcgagcatccggcattgaaaaaaggacttgaaattatgcacagtaaaccttatggcgatccatacattgatggtgtctgcggtgggctaaggcattattttaattgttctatacggcacaattatgaagagttttgtaattttatagaatttaagcatgaacatatttttatggataccagcagtttgactatcagctcctggagataattatttgcaaacgtatgatataaacgcgagcaatgtttcggcaaagctaaacgtaaagaccatactgacgatttcgatcgatatcgtggatgtgacgcgcgtacctccattaaattggatgacctgcgtgccgtggtgaaaatcactcatccggttaactccgtggttaaggggtgagtatattttcaggtcagtacacaagagggggctatttgtaccggctgtcaggttgatggcacaacgacaggaaaaagaaaaggcgggtaataaacccgcctgaatatttagcgtggtatatccggccagtcaggcgcagatgtatccaccctgtttaccattacgctataaagttcccatgcttccagccgtttaatctcttcatctgtggcaatttttagttttactgcccgtgccagtggtgcgatggctgattcagcctcagcaaggcggcgaactttttcagcctccgcctttttacgcagctcttccggagaataaccccgttgaacgactttaccgtcctgatataaccacgtaccatcaccacggcaatcatcagggcagtcagcagcgtctatttccgcaacagacatattaaccggccacaacattgatacagaatatgtgtttcctcgttgcgggactggcttattaacaacaccccagataaccccctcatggtcgtacattatttttgcagtatcatcagaaaataatgactgacactcataccagtcctgtccatcgtccgactccagaaaatatgcacctatatttatttcagcctgagttttatccctgtttacgggcgcgtcaataagtctgaaatttttgatattctgatattttttcattataccgttcccccttgtacggtataccactgactcccgactcgtttttgcaaaggcgcataattaataccatcaatattttcgccctgataatctttccagacggaggtaactacatatccgggagtgttaggccaggaacctgcattgttccaggtagtcactgatgtgccagcccctaactgaacatctaagacgagattattattaatccaggtacttaaccagccatctccccatagcgaaccaaagatgtcgccgttattctgatagatagccccgcctgcacgaagcgtgttagcggtgatatctccattgaccgtaaagacaatcgaaccgtcaggatttcgctggctgtacagatgccatccctgatcgtcgtccagttcaataactgttggcctgtttgcgtcgccccataaattaaacgtggctgtcattgtcgaattattattgctcgtcagtgacagtttttttgcgttgcctgcgcgtacggcaccattagtgagaacatctactgacatgtgcagcccggaattgtcgatataaccaaccagagcattattggcataaatccccagaacgccgtcactgtgccacttaaaccctgtatcgttatctccgaatacaatcgaattaccacccagcgcattatcagtaccaatgcctaacggaccgtttagcctccctccattaactgacagtgcctcaacgtcaccggctgtgggtttcatcagactattaaacagtgtatatgtctgaccgctggttgagtttcccggctgaactgatgaatattcaggcgtactgtgcagcgtgacatttgcattaccggtgtaatcatattgcgcaattaaccagtacgcatactggccgatattaatataaatatcgtaggtgtcgcctgatgtattaacccatgcgacctcgttagcagcagaaggtgaacgcctccataatgtggcggttattccaacaggtgaaccattaccggcacgcaataccagttcgctgattgccgcctgttcaggtgaaccagcgttaaaccccgccccaccgtacagtttaatcaccgcagttgatgtagcctgcggcattacaaccgtggcgattttgaaccagcctgattcgccaagtgtaatggtggttgacgttaccgcaccgatggttctcgcaaattgttttttgtcaggaatatcgccgccgttctgcgatttttgcagggcccctgcagcgagatttatcgtttctcctaaaccgacgttctggagaaacagcggcttattcgggatgtccgcgccattctgatttttttcaagacgggttttaacctgttcatcgatcagcctgccaatggcggcgtgaagctgcgtatgttcgcctttactgagtggtatgccggcggcttcaataacagtacagacctcttcctggactgcatcccacatatcactgttgagatccgttgcgcggcggcccgtggcgggatcaccattcgtaaatccgttttttccctgaccaaatttatctttttgcgcggtgggcgtatcaattctgtgcattctcttttccttccggataagcaaaaacaacaaccgtatgtgacggacaaagcttatcaatcacacattcagcaacagtatcgccccacgttctgatcgcagagtcgcaggtgcttgtacaggtctgccagctgatgttcgcatcagccggaatattcacacgccagtagtaacgccagaattccccccattcaggatcgggtgtgctgtcgagattctgaaactgctcaatggtggcagcggtataccccaacgcatcaagctgttcccgataaaacctctcgtttataccgccagcaacatttgcctttgcatccagccgttgctggcgctgctgtaatgtctgaacgccttccggtgcacaggaatcaggcaggccatacagctgttcataacggtctatcagttctgtggttctggccggatcaatttcagccatcagttcatccgctctctgatgtacccggttcagcgacggcgccagcccttcaatcagtgggttttctccgtcccaggcaggcccttccggcagaaggtgataaagtaactgcgtatattcgtcctgtaatgccatagttatccgttctccccggtataggtggcccaggttatattccccaggacaggaagttcagtttttcccagcaccacatctgccgccggcacacgcagctgatgtgccacttccccggtcgccagacttatcgcctcgctgattcgcgaaacataaatttttccggacggcgcgccatcacgcagcatcagcgcatttagctccgcaataatggcagtacgaatttccggggtatctttggccagtgcgactgttaccggaatgcttttttcagtggcagcgaaaacaaagagtccgccgccagcaacaggtgccagcggcaaaatatggtcacgtacagccttaacgagatcgtcgtcaggagccggattcaccgggttactggtagccaccatcacaccaacggtgccggtccccttataatggcggaatgtccacgcacgggttattcccgcgatttcctttgcccagatgacgtaatcaggatcagcgcccccctgtggtatccagtaatagcgttccatgacgcgcgcgcgccacgtttcaggctcctctgtatcagccccccccggtcagagtgtcagcgtaacctgtagaaggaataccagtaatcggcgtgccaaggcgtaacgccgtaccatcgtcagtattaccggcagttcccgccacatcagcaataaccggcacacgtaacaggccgccggaagctttcaccgtctgcagggtcgtgaatgtaacctgatcatcccgctgaatctgtgtacccgcggggatctccggcgttccggcaataccatcccagcgtgcaaatcccttcgcagatacggcatttttcctgggacaacgcttaatcctcgcgtgacggtaaagccagtcctcatcacacatatcaggcagcatattccgggccagataatcgatataaccatacagcgtatgtacggcagcagcctgtacccggctgtaaacctcggcatccatgcgacgtaacacaacatcctgctgaaaacgggtcagtaaatcgctgcgaatggtagcaatcaactgaggaagttcaggacgtgcaaattgactgtcagccattaagtttgctccatatatcatcgaatgtaatattgtgaattaccccgtcccgctgatatatcgtcacgccagctgccagggtatctgttcctgtgcgttcagatgtcacatcaatacgtgccgccacgccatcgtctgtcatccacgccagcgcctgctgcatgtattcgcgggcatcctgcggcgttttattggtgagtttgcggcgtttcagcaggtagaggcgggaaccgatgcggtcattctgaacagcaggccaggtgtccccccaccagccgtatggctgtggggtcctgtcatcccgctccgcccggcgccaggtaaaaagagaaatcaccactgcccgcgtcagaaagtcgagcgaagccgtggcatccttacggattccattaacataaaggatcatggtgtcagctcatgggttggccaggcttatcggttataccgccgccatcgccattttctttatgggtatgaccgttataggtcgtgcgcatttcagccatcgtttttccactgctgtcacagttgtccctgatatcgccagtggattcgatcggcatttcaaaacgtgctttagtggcattcgtgaaaataactggctttccgccgccatttaccactattccggctcgggttaatgtgaccgactgcccctgatcgtcatatagcgcgacttccccgcgcgccagccctttcagtctgaagcggcggtcagccacaaccacagccactccgtgcgaacggtcaccgccgggaaacaataccaccgcttctgcgccattctgtgctgcagaggtgaaaccgtaaggttcaagatgctccacattctcttttttttcaccggcaataagtttcagtccggcagtctggcattttctgacggtatcaatcgcggtaatgactgcgcgcgttatcatgttctgaagaggatggttagccatcagaaatctgcctcctcactgacttttttcttcgctttcggcctgaatggttcaggaagataggcatccgcaggccccacccggatttcggtcagggtgccgttattgtcctggctgtacgtcacttcggcgatcaccagcgtttcattgtcaaaaccgttcagcgggtcatacaccaccacggcctgattcggtttccacaattcgccattcccctgtctccatccctgtacggtataggtggtttccagcgttttcgccgcacgctgacgggcttcaaattcacagcgtgatttgcagctgtcagttgtggcagttcctgactgctgaatggtgtggggacgataccgcgtgacgcctgcatcaccagtactctgccggatagcagcaatggttgcctcgccgaaatcgtcatccgtaccaggacgctgccccgtaaccagataactggagaaacgctcacgaacactacgctcggtatcacaggaaagaatattttcgccaagtaccagtgccgtggctgctttcatactgcccggcctgccgagaaccagccgtccccgttcgtcgtcatatgccagcgcctgagcctgtccaagcagcctgttcagacagtccacaaccgtttcaccatgttccggctgagcctcaataacggcggctgccggcgcgcctgcatcaacaacgtccacaccgaatggccgggcaagtgcgctggcgatcaggaataaattttccccgttatgctgtgcaggcgacgcagaacagtcgataagatctgccgttttgctgcgcccgacaatgcccgtcataatggtctgcgcatcataacgtagcggtaacgcctcaacccagccggtaataactaaatcatcgccaatgagtacctcaacagagtcaccattttttactggcggtacgtcttctccaccaggccactgccgggtgatcgagacattaaagtcccgggcaatacggtcaatgcccgcacttatccgtactgacgtccatcctccccagtcacgcccgttgacgcgtaaaaaaaccgtattattcatcgtaccggaaccctcagcggctcaaccgggataaatcctggatggggaacgggattacgagtgaggatgtcagattcccgcccggcgtcgtcataccaggctgcagccagtaccagtgcaggcagaacatcatcaggcgttcgcaatgcagtacgttcaacctgtgccagtcgtgcagaaatatcgcgattgagatccgtccgcataacggaaatttgctggaaaagcacatcatcccggatacgcaactgctcctggtcaatcgcagcattgagcgcggtccggatagctttcagatcctcataattcggtggagagctgccattactgactgtctgtacaccatccagcgccgggtgcatgacagtgataatgtctgagtcacggcctgttcctgcaggctgatttacgccccggacaccaggtacatcacgcggctgcttcagtgttgtcacggcgtggacggctgtgctgatggctgttgtcctgatggcggctgcgatcatattgcgttgcattttctgtttcgcagcagatccggagtcagtgggccaggtgcctcgaggggaaagaccgggatcaagcgtgatacctgacatcgtttttatcatcgtgaccagatccgatgtactgcccctgagcctgtcacctgagcgccaggctttttgcagtgcgttaacgaaatcacttgcggcgcccggtggcatcagaatgacagacaaatccccctgtaacagccgcattgcggcagacacgccggagtcaaccatcctgaaagcatcggcaacatcgcccagcatggaggctgcatcggcaatgacatcgttctggataaaatcagaaatacctgacaacgagaatgtggaaaacatactgtcaatcgcatcgtcgaaaagcccgcctgacgtttccaggcgcttcgccgttgccattcctgccaccggaaaagaaagttccccactttccacaaactgaaaggagacacgacacatgcgcccttctgtactgctgtgagtgatcctgacctgtccgtcaatgctgccctgcatttcgccatactgcggatggaccagcgtaccagggcctgcggtttcaatggcaccaataagacgatcccgcctgtctgcgtaatcatcaccgacaagataagcatttatcgtcaggcggcgcgtggcgcgacctaaatcctccgtccagggcttatccctgttcggatattcatgtacctgtacgcggcgtccaaaggtgctttcatcatcttcaacggagaaaggcactccacgaaatgatgcatcacgcaggcgcccgcgccagccagttgaggagaaaaaagccatatttaccccataagaaaacctgccggagcaggtttatcgtgatgtacgaaagggtgagtaacccacatcatggctgatgttcatcaatggattaccggatttcggtatatcagtcacacgcataccttgtggtgcattctcaaatgtcactttgagttcgctgcgctgcgttgatggcgggacagctcgctcgagtacgccagaacgccgggtcagtggcacataaggttgataacgcccctgcggaatcggggtgtccataccaagaagctctttgagtctgggaataaaaccgttatacccgcgttcacgctccttcgtttgcagcttctgtacagcgaatgcgccagcatccatacccgcatcctttgccccctgctccagatccttaagctctttaaagagtgacaccgccacgccaattgtcagcgtcatggcccccatccggccaattttacccagcagaccggaaagccgtccggccagcaggacggactgctgcagggcaccaatggtcctgacggtaaaagaaccagccataaccagaccaaccccttcaatcaccgtctcccatccgcccatctcctgcgcaacgttatcgacctcctgccataccgccttaatcaccggagcaacatcgtcccagttctcaatgatcagcatagcgccggccaccagcgccgcaatggcgactttcgccggagagagattaatgacactgttcaggattttgacagcccgggacaggctgccaatggatacgccaacagccagcagcgccgcgccgaacttcgccgcagactgaaccagttcaggattcgcgcgaacgaatgtccggagctgctccaggtaaggcatgaccgcttctgcagcttcgttaatggcgggcaggaaggtatcgcccagcgttaccgaaatcgcattgacgctgtttttcagcagaaccagctggttttctgttgtggccgcgcgggatgcgtattccttctgcatcgagccgccatattcctgggcatcagccacacgatcaaaattggtgcgtaacaaatccaggttggtcagcagcggggcaatcgcgctaagtgactccttgccaaacagcgcattcatgacggcggcctgtttagcttttggcactttcgcgagcgagtccagcaccttcagcatggccccgcgcgaatccttttgcatatcctcagcgagtttccggggattcagcttcaggaaagccatagcctgtttctgggctttggttgccgaattacctgcggttaacgacagcatgaagtttttgatgccggtggaggctatctccgattcaacccccatcccggcaatggtggcgcccatcgcggcaatttcgccggatgccactccggcaacaccgccaagcggaccaatccgcgtcacgatatcagaaattttcttcgcatttgccgggccggtattccccagatagttgattttatcggccaggacaaccacgtcttcctgcgtcagtctgaacgctgtccgccactgcgccatcatctgaccggactcttcggcagtggtatcaaacgccacacccattttcactgcgtcgttcgcaaactgcatcaaatcgccgcgggcaatgcctgcctgcccgcccgccgccacgatctctgcaattccctccgccgccatcggtaactgtgtggacagcgtcaggatatcgtcactcatctgcgcgaatgcttttttatcatccaggccgtcaaccaccttccggatgtcagccatttttgactcaaagccgatcgcagcattcacgggcagcgccagcgccccaagaacagcggtcccggcagcagcagcaccgatcgccagcccggccatttctttctgaaatcccttcagttcccgctgcatccctttcagcggacccgataactggtcaacggcagtgataatggcctttaactggaaactgtcagccatgcttcatttcctcattgatacggacagcctccaactccagctccagaaaatcggatatcgccgcccgccggagctccagggggtttattcgccagaagtatgcggtgttgtagacccgctttctgagtcctcctccgtctccgaccgggtaaaaaaattgaggatcaacatacaggctttgaaaatatccagttttgccagttgcgctgccgaggagcgtggaatacctgccagcacagggatatatttcagcgcaaccgaactgtccagccggacgccgccgtcaccggaaacggtgaacggaaaaccaatggcttcgatttcatcgtaggacggttcgcgcagctccagcacatgaagcttttcgttatgcgccataatcggctttttgagcacaagttcttttatcactggtaaaatccctcctcaccgtggaactcaagatccacggtgccctcttccgggttatggttggcttcgccgtgcagccaggcgtttgagagaacatacacctgaccatttgccagctctgatgtgatggtcataacatcagaagacgtaattttatcgaccgggaagtttttcggcactttggcggtcaccttcgtatacggtgcccggctggtttccttgtagtcaacggaaccatccaggccaatcacgtcgtcacgaactttggtgttcatggggacttcaatccctccggttaccgacagttgctgtccatcgattttgaaatacgttgttcccgcaatttttcccattatgcagcctcctcgctatactgcagacggaactggttaagcactgcaaacacacgtaactgattgacataatcaggcggaaacagcacatccaggcggttcgaatcgttcgcgttacgctccactatcagatgttgctggaacagatcgaagttttccacgatgccttcccgctccatctggcgatatgttgatcccagctcaccacggataacggcaggcgtgacaatggcctgaccagacccgaaacgcgtaccatcattagcaagtttatggcgcccgtatttactggtaataacagatttcagacggcgcaacacataagcactggtatgcagcgtctcgctgtcaaggtagctgttatccgccacaccatacgcatttttcctgtacgtcgtgatatcccgctgaatacgcagcacgccgctttccacatacgccgttgccacaccgtgggaaagtaacgtctgctgttcagtcgtcgtgaaacgtttgcctttcggtgccggcagcatgtccaccagctccccggtctgggtcgggcgcgccggatcgttacggataaaaaccgcagcacgggcagtacggcttgcagccagttcatcagcaggcgtctgggtgtctttctcatagcccgccagggtgatgtgctgcaggttaaactggtcacccgcggccacaagctccgacagagtccccgtcttcgccgtataaacgtgaccatacaactgccggacataactccagcgaccgctggaatcattcatttcagttgccatcgagttcaccgatgccgtgtcgttaaacggaaggccgatataatcgaacggctcatctcccatcgctgccaccgcgtcgttaagagctggcgcaccagcccccttcacgccgctggcaaccgtaatattcacacccgccggtaacacctccccaccgccaaagccgtaataattgagagtgaccggaatttcatttccatataaccccttgtggcgcgcagtcagtgtcaccacccccgcttctgatgttgccgtaaagggaagatcagggtttgcattgaccgcatccttaatgctcacagccaccgccgcagcgtcatcaccgctggtcacgggagcctgaacgcgggttcggccggtatagacattcaccgttccggtttccgtcgcttcgccagttaccgtcaaagcgacggttgctgccgcgcctgtggattcaggtacggcaatgacatacagttcgccaaatggatcggtcttacggtacgccccgaccatacgggccagctggcttccggcaccgcaaatctgacgggcataatcaaccgatgacaccagaacaagactgttgacggcaattgacgcatcattgctggcgtgaccaatcagcagtgatgccccgctgtcccgggcggtatttgccgccgagttatccatctcggcataaaacagcggaacccgtgtatctgacgggatggaattaaaactaatcgccatttgttttcacctttttattcgtgcgccggacatcaccagcggcctcgcggcgcagccagtagttattctcatcaacatttcgacctccttcaggtaaaaggtcgccacgggccggatcgggaaccgatcgcccttttgcgggtttcacaaacatggtttattcctgaaatgtaatttcggtgtggtgctcgatgtcgccatctggcccggtaccgggttcgataaaatcaacatcaatactgagcgttttaagatcgggcaggccgtccagatcatcctgctggcgggtgtctgtttcggtaatttcatacttcaccgtgaagtcgaactggtaatacagttcgtggcggttcagatcgagaagcatcccacccgcatactgaatttcatgcacctgcgaatccggctcccaccccagcagcgccttccagatttcctgcctgacgtcgtgaactgcgtcgtaagaagcccactgccctttttcatcccgttcgttgctgagtaccacgatgacggaaaaaccctccgtcaaatcctgccagtagtcggtctgcgatttctgctcacccgtgacgtcttcggctggcacaacatacgcggctggtagtctgagctttccggcctccggtatcgctttaaactgcgctgcgccacccacacggttttcaaaccgagggcaacggctgcgaagtgccgcaataatcggggttaatttcattttttcttccttcgctgaggacggagtgattttcgcaattcgcgggagagcacataacgtgtccagctgcggcgtttatccagaacctcagtcatgtagttgttacgtggttccacacgccagccgctgccgcctgatgcgccgcgatgatggcctttcttacgtttcgccccacggcgaacaccgtagaacagaaaggcggggtaaaaggcaccgttgatatgccggttgccctcgccgtttttctggttaggcgcgatcttcaccatgagccccggacgtttttttgacgcacggggtacgtagtagccgatagaacgcgccagctggccggtgcggtacgaggggttttcgcctggcttcgagcggccacgtttcatgaccagtcgccgcgcatcacgcatgtgcacctgaccaattttgacgaacgcccgtcgcattctcgcccggttaaacaccagttcttccggctgtacgaaatcaacgtgtaaatatgctttctgcggcatagtcactcccgttatcggtacccagcgcttcgcactcgatcaacagaaagcggcgtttaccgttcagatcacggacccgtttaacccgataagaaatatcgtcgtggagcacttcatgatcggcggtgataccgcggcgaaaacggatggtgaaatagtgcgtcaccctgttttctatctgcacagacccctgataagctgccgcaccgggttgcgcttttttggcccacgtccggatctgctccgggtacgtcggcgttacgccaaagtcatcagccggaacatcgacacgccgccggataacaatgcgctggtcaagttcgcccgggtcgggcaaaaggtatgtggcgctggtctgcgcctgacgaattttcattgtggaaagtacctgtatggaccgacaagccagccaaagctctgtggcatgtcgagtttttccacttccgtgacggaagatcggttttcgtagaaatgactgataagcatcaacatccccagacggatatcatcctgcaggagcagtccgtcaggatcgctgtccggaatggtttcatccggcgcatagagcttccggttcagatacgtctccgtccgcttttgtaccgctctggccagcagttgcaggtaacgctcatcggcttcaaaatcctcatccagccggagttgagctttaatttcttccacgctcagaagcatactcagccctcttgactggtcgtggattttttctctttcaccgctttattgctttttgcactggtttcgcactctgctaacccggtctgaagcgcaatctcctgcacccgggccgggagtatcctgtcgtcgtgttcaccggcacgaatgatttcaacacgcagaccgtctggcgaccatttgagatcttgtttcaggatcatgattccctcacctgtcagaacaggggcgccgttcagcgccccaccagtgattacgccgcagcgattttcagcagcttgatagcctgtgaatcgaccagcatacccccggtgcgcttggtggtataaaaaccgacaaacggtttgttggtgtacgggtcgcgcaggatgcgggtgccgatacggtcaacgatggtgtaaccccgtttgaagttaccaaacgcaatggctttcgcatcggcggcgatatccggcatctgttcgttttcagcgataccgtaacccgccagtgaggatggctgtcccagttccagccccggacgccacagatagttaccctcggtatctttcagcagacggatggcaaacaggctgttgttgttcatcatgaacttcgcgccggtacgatgcgccttacgcagcgtgtaaatcagcttaatgatggcatcagcggtcaccgcggtcgcttcaccggatacgatgtgctgaagtttaccgaacgcacgagccttatcggactcttcggtggattcataggccaggaaccctttcggcttcttggtgccgtcaccagtggtaaaggcaatttcctcctgttcggcaaattcggtcgccagttcactgttgatccaggcttccacgttgaagaaggcatcatccagcattttctgggtggcctgcgggttgccgtagatttcccccatgaaaggctcaatcagtcccagcctggaagtagcggtctgggaacgcgtgtcagtttcgccgacccatccggaagccgtaccacccagattcaccagttttttatagtcggaaccgcccacggtgatcaccgtggcctcctggcgcatcaccacctcatctttcagcaggctgagaatgctgcgatccagctcttccggcacggcataaccaccatcttcatcagtgcccacctgcaacgccttacgctccagatcgcgcagaccgtcttcgcggcctttacgcagaaagccgacgaaagcgtctttatgttctgcagccaccttgttttgcgctccacgtgccggacgtttcagctcaagcagctctttttcaaggtcgcttttgagattttccagctcgctgagtttcccgttcagggtttccacctgcccggcaagcttgcccttttcctgctcaatcgcctcaacgcgcttgtcgttctttgctttgaagtcgtcaaacttctgttgcagttcctgcgcgacctgttccacatctttaatatcaaccgccatcgtatttctcctgattagaagttcagatttttcagtacattcagtgcagagcccacatcctcagcgtcgcgcagggacagtgcgccatagcccccggccatgaatgctttggcctgggtacgggagagtccgacatcacgcaggactctttcgatttttttctgttcggggatttccccgcgggccagcgcgttcttgacgtcgctgatccgtgcctcatcgtttgacgggaacgtcaccagactgacttcccagaggtcgatttctttcagcagaaaggcttctttgctccggtcgtattcccagtctttcagtacgtacccaatagaaaggccggttaacgaaccggccttcatgtgtgcatgtgcacgttttgccaggggatcatcatcaatgagcaatcgccccttaacgtaaagcccgacatcgtcttccttcatttcggtgtaaacaccgatgggctcatccatgcggtgctgccagagcagcgcaggtaacgcttttctgtcactccactcccgcagggaagcagcaaatgccccggacatcaccacatcatcgtggctgtcctttacaccaaagacggagccatacccttcaaactcaccggagtcacttacagatttaagactcagcggtacatcaagacgttgtttcgtctgcattggcgttatccttctgcttaccggctttactgccatcggagggtttcgtggtcatgttcatcggtgtgagatagacatcaccaccgggacgcggattcatatcttccaggtcgcggcagtcattgggagagtaaatcccccagttgatcccggtggcataggcttcaaaacgggacttcatatccccacgcagtaacgcccccgcgttaaatttggcgtaaaaaacgccctgcttactttttcgtaccagtccggtgttgatccgctgttcgatgcgggtcagatacggcaccagtgaatagttgataaatcccagccccagctcttcaatattgttgaaggtggcgcgatcggtgttctgcaccatgtgcaatggcacccggaacagacgacagatttcttcaagctgaaacttgcgggtttccaggaactggctgtcctcggcgttcagcgccatcgacttccagtccagccccatctcaaggatcatcgggcggtgagcattaccaagcccggtgtgacgctcctcaaaatctttcttcaggcgctcataagcctgatccgacagcgtctgctctgtacgcaacacacccgacgtcaccgcgccattgctgaacagtctggccccgtgctcttcggtcgctgccgccagcgatattgcctcgcgggcataggcgatgggattcagccccaccagtccgtccagcgtcagcgtgcgcacatgccagatatcctcctggctcagtacatccgtggagccatccgggaatgtgacctgatagaccggctcccagctactgttaagcttcggcaccacgcaaccgggatcgacgggcagcagttcagccacttcgccaaatgctttcactttgtaggcataaaagttgccccgcaggcacagacaggtgaccaccagctcccagaactcctgcggcgtcatatagccattgggatgcgtggagatcagcttatgcagacgttcgccagtggctctctgtttcaggctgccgttcaggtgatacaggttgcagggcaacatcccgaccgactctgccagcactctgacgcaggaaaaaaccgccgtcagtcgcatggcccgctgactgctgatctgctttccggtataggtgtcgtatgacagcccgatagcatccgccagctctgctggcgtggtcaccggcgcgtcactttttcgttgaaataatcccgaaaagaacactatttacctccgccgacagactgctgtgtacggtcgagatatcgcgccaccagccacgaccagaacatgcacagcgccccggcaacaacaaaacccgccgggggataaatcagccaggcaccatacgccagcaaaagcgcacccagcacgcccaccagaggcgcgagaatcagcatgatcataattaccttagttaaagcgagcggatcccgtaggactcaatgtggtcagacagcgtgtcttctttctcgtacagcatggctctgccaaccgccataatcagtgcaactgcaccatcgattttattttccgcctgctccttaataggcttcaccacgtcatcgttacccggaatggttttgccgaccacgttgccgatacaccaggtcatgatgggattgccgtcatgatgaaagcgacccgattcaatcgccgcttccagttctttcatcggatcggacatgttggtgtaattctggatgatagtgacgggattcaggttttcatcagctagatcatgtgaaagcccggtggcaccaaatggatcaatgggggattcgctgaccgggttcagtttgttcgcagctttggcctcttcaaggatgtagcggtaatccacctccgcaccatcagttactgtcaaaaagcccatttcaacccatttctgaaaacgttccgcagtacggcgatcctcatttttctcaacactgtagaccgtgtcatacggcacccagaaacgtggcgccacgctgtaaaaatgcgttttcccgtctatttcacgggtaaataacctcgccatgctgttcatgtccagcttacgagccagatcgaacgccagtacgcagggttgaccctcaaacagttccagcgtcagcgtcttatcctcacagttttgccaggaaaccagattaaagaatgctgtgcgggcggcaacccatacattgagatgcttcgttttgaacacacccgcatggcgggcattgttaatagcacgctgttgctgactgagaaggaagtcacggtatactgacaccccaatgttcgggtttgctttctccagcacttttggatctgtccagtcatccccttcatcaaccgtgtaaatcacgccaaaaagttcgttgttcggcaccgatccgttcagcatctcaatcacttcgcgtcgcttgtcgtaacacggcccctcgatgttgtagcccgccgtggttattgcccacatcagcggctgtcggcgcgcgcccatacctgtaagcattgttgtgtagagcgcatccgtagggtgttcgtggtattcgtcaactattgcgcagtgcggtgatgccccgtccccggggttgccgatcaacggctcgaagcgggcaccatcctccggacggttcaggtttgaggcattcacctctataccgaatgcctccaccagtagtggtgtgcgcttacacatcagacgcgcgggacgaaatacctcccacgcctgtttttcagtcgtggcgccggagtatacttccgcaccgaattcgttatcacaggtgaaacagtagagagctacaccagctgaaatagccgatttcccgttcttacgtggtatctctgtgtagacctcacgaaaacgacgaagctttgttcccttctgtacccagccaaaggcacagcacacgatgaaaagttgccacggttccagggtaatcagcatacgtttgaacgcccattcaccttttgtatgtggaagtaactgaataaactttgcagctttctcagccatgtctttatcaaagcggtaccgaaaccttttactcttctccgccgccatatcatcaatgtgacgctggcaggcctgaatgacatactgacatgccgtgatttttccccgcacaacgttgcgggcatactgattagcggcgttaacgttgggatatgatttccggctcatgagttgatcatcttcaggaatgggttagatgttttcttctgtccggccagaccaataaggcgctgtcgactactggggtcaaggcccagcatagaaccagtagaactcatctccgattcctgttctttcttggcagtaagttcagggttctttattttcccccccatagcgccagttatggtgttaccttcttttgcgatattttttactgctctccgccagaactcgtaggcgacacaccagcgctccagtacagccaaatccgtaacacacagcagtccctgaccacacaattctttggtggtcagttcccacataactgatgccagaggcatatcttcttcgttaaaccagtccggaggagaaaccccatttattggtgtgaatactggttcttctttattcagggctcgctttccggggttcccggccagctccttgcgcgccgtaggcttggggcgacgcccggaacgccccgccgttccagccatatgcggcactcctggttaaatttcatttttcgcgggtataaaaattcgagggggcgggcagtccggaagacgtcaggtcacagggatttgacccgccccttccctcagacagttgagaattattatcacttcagacgctcacgggctgtcttagccttatggcatggccagcacagactttgcagattactgtctgtatccgtgccgccatgcgctttgggaataatatggtcgacagttttcgcctcacgtaccacaccggaacgcaggcacaactgacataaacctttatcacgcttcagtacacgcgcacggataacgtcccacttcgtaccataaccgcgctgatggcgggattgtcctggcttgtattgtttccagccctcgcttctgtgactttcacaatatccggatggatctgttgttgtactgcgacagccgcgaacacggcaggctttaggtgttcgtggtggcatataaactccagtaaaaagccccgcgagtgcgaggctaataatttgtttaaattctcagtgtcagtctaacttaatgagttttacaggcttctcacccgcttcggcacaccagttgttatattcgtgcacggctctcatcaattcactatcatagtgactgaccttctctacaaggtcagtaagagattgtgggtcaaactcaacgagttctggtgggacgcgattaatatcccctttctgatgaagggagtaaacggatgatcgtaaatcccctatagctttcatccgctcagcatgaagcgcttttattttttcgttgagtattttgcagcgcccaattgcttcgtagtttagttcagacattccggcctcctgttttcaggggttacattttaaccgatagctacagcatcatcgcagacactcagggaacgcctgctgtaatgtactaactggattaaccggctgtaatcacaccatgccgggtaaatacatttgcacttcattcactactcgctcacgagcaacgtgaagcaatcttttccgcccaccaacgccccacttagccatttgacttgcgcactagcttatcgctttggtttccgtgttgatgatgtgatcgattctattcagacgagacatggcaccaacgccgagacggacaaccgttttgaaaacttcataaacttcgatttcaaattccggcttaatccatgctgcatatctgattgccagtagttcaacaccccacacaccagaatcaaccccaccctttattactttaagtggttgaatttctttcaaagctcttttttgagctttggcttttagtgctgaaatgaaccgtttaatctgtgcactcctcagaaaattactggggcgttgagattcagttgcctcgccatttgcaactgctgctgcatgaagatcgtttaagttgtagcgtccgtcctcatcaacacgaacggacacaccattgacaataactgttgggtacttcatcagtgatcaccttttagtgatgaaccttgtcacacaggattccggcccacagaaaggcaccgatcaccaaaccggcatcctcaagggtcatcctgaaaggttctgtgttcagaagtcgcgcgtgtgaagcgcatttactgcggatataaaaacgccccgcattacgaggcattttcatgaaagtcacttgtcaaatttctatgtgatggaaattatttcaggcactgtgttctgatatagtcctgcgccccttccagttgcttttgcattgttgtcactcgctctttgagggtgaaataatcccgttgagcggagtctgccagtctggggcgggctgcattatccacgcgggcggcggaggtggatttacctgtcgacactgcgggacaggtggcgttgacgagcaggcgacgacggccagcggcgacatcatcgcgcaaagcatcattctcagctttcgcatcagcgagctcctttgtatatcttgcatcaagggcggcaacgtcacgctggcgcacctccatatcgctgatagtctcgttcgccagcgtcagactatgactggcggtatcacgctgcgatttatactgaatggcgttgtcgcggtaatggtctgttgtccatgcaagtacagcaatcagcaaagtcactgagagttgcaaccagtattttttcagcaatacaggtaacagattcataccagcaccgattttgctttttcaaagcgctctcgcctgtcaccgatgccgttctgccctccgttaatgatctgcgtaacgcgcaccaggtcgccggagtatttcagacaccctctagtcacaaaaaaccacgctgcggaacgggcggcatgacgatccagttcaagctgtcccggattcgccaccagatccagtttcagggcaacgccgcatctggtgtaattctccagcccggtaatctggataagcccacgcccgcgatacttccagccatctccggcgtctttgttacccatgcggccaccgtaaactagattggctatttgcggctggtgggccacctgcttaccatcgacacgccccagcatttcacactgatacggcgtcaggcgtttaccaaaggttttcatcagcccatctaccgagtagttgaagctctcgaccagcgaggtaaaaccagcagattcatgcccaacttgtgcaatgaacatggcctgatccagtggtgcagtaataccgaattcgctcattgccgccgtaatatgcggataccagcgcgcagaaagcccggcgctaataccagccgcctgctgaaattgggattcattcatgattaaacctgtggggggttaccaccgccaaagcggttactgaaatacgttgaaatgatggtgctgattttcttcacgccgataaatccgatagtgccgccaatggctattgtcagacttttcggcacatcaaaataatccagcgcagaaaccgccgtcagggtcagggaaccacacagcaacccttcaaacagcgtttctttccagctgctgccgttatagaccatgcggaaaaacgcaacaacgattgccataacaacgccgccaatgggtacgtctccccgccaccagctttgaaaaagttcgatccaactgtcccacgaatggggatcaaagtgcattttcatgacctccccctgtccgggagactgtttacccgggtatcgggtgagtggaaaaagaaaaggccgccaaacagcagcctgtgaatggttgccgcgcggtggcggcgttttccccggtttgatattgttgattcgccaaaaacacaacgttaaacggggtaaaaatgagtaattactcagaccttttccaaatcatcaagatcagagtttgccagaacaatgatttcccaacttattcactggcaggaaccaataactaccgcgccagccaggtatggtatcgaatcggacagatattcacccttgaatgcgtcctcgctgaatacagaagatgctgctcatcagattattacctgctggacaacgaaaaggcacttcaccaccttatttttcaaatcacaaagtggaaattggaggatatcagaggattatctcttaatgacagtctgtttattatttcagacaggctaaaacctgattacatgccagcagaagctgcgcaatttctccgctcgctgaaactgccagtcaatcattattctgttgacgatttctcggaagcggactgggatcccagagaaaactcagttttcctttaaaaccaccagcagacattcgttcaatttctgctgaaatctcatttagccgttcctcaagggcggctttttcatttaccagttgattatagtaggtcaggtgaagtttttgctgccctaaccagtcttcaagttgttcgggcgtcatgccagggttaaaaaaataaggctgctgtttaccatcttgcattacaggctcccagaaacgcaaaaaccccgcaaaggcgaggtttcgtaattttaattgacttgcttttcgtcgctgccatcgcggcgcagctttgccaagcatggctgaatcatagactttttttacctgttttcaagatattttttcattttgctttctcattgcatccctgaatgcgagaaatacagcacaattaaagtgattcacacaccatcgcacacggtcttcggcttgttttctggtcaaccacggcgctatctcctgaagatatcgtccgatgtcactcactcgcttacgacgcgcataaaaatcaataccgacgacaaataccggatcgtctttactcagcgccgaaaggatgcacctttcaacaaagtcgctttcttcgatgcgcatttctttattcagcagatcggctatagactgcttcggccacaatatctggcgggccatagacaaaagcgcttcgcctttatatccgatctttctcagccccttgattgtttccgtgatgcgttttgcttcattatccgtccattcttcatcctgcaggcaactccagaacccacagcaatcaagcatggcctcttctgacgttctccctccgtaacattccccccagacagacagtaatgatttaacccacgcactctggactgacgtaagcggcctgaattttcccagccagctcttgcgcggcgcggcagcggctttttctattgcgttacgatgttgacggcgttgacgtggtgtcattccttaccccttaactcagtacaccaatcgccagtgcgcgatcgataaaacgaaatatcaactccagttgagagccgtatttctcttcgaatgccacggtgtccgcatgtaactcattgtgatgcgttctgcacaacggcagcacaaagaggtcatgcgcctttgttcccatccctccctgaccgtggcctatcaggtggtgcggatcatccgcctgcttcccgcagcaggcgcacggctgggatttaacccagcgggtatatctctcattgacccatcgacggcgtttcggacgtaacatgaagctttccggcgattccggatcaaccctgagcgccagtacctttttcgccttatcctgtacaatgctggtggccggcaccgagggaacaatttcactttcacgggtagctgactggacaattgccttcggcattcttaatgcttttctcgcagcgctctccggtaagacttctgccaggtcattgcgtaccatccaccagcacagttccgggagagtaactgcgtgcatatcgtcaaaacccagatcacgacaaacaaccgataaaacccattttgtcgtgttctccacagctattgatttcagccgttccgtaaactgttcgcgcagcaggttatcgcagtgccagcacagtcggattgcccccggggcgtggcgcatggttgtcatctgttcgctgtgccagtctgaatgcggccactgacagccattcccccggagtagccagctttccagactatcgagaccaccagcacgatagataaccgactcattacggaacacatcacgaacagcaggatcatccgccagcggctgtgataccgccgggaccgcgccgcaggcgaaagatgaatattgttccggctctggttcaagcagaacacgcccctgcataaacaggggcatcagttccgctcccggcctgaacaatacaacgcccatacgaggagcaatttcaggggtcagtaacgctctcacgatcacctcaatgaacggtatcgagcagcttcagcagctcagggaatttggattcgaagaaatgcggttgcgtctcgcgagggtttgccgggctggtgatgtttttgccgaacatgcagcctttcgccgtcagcgaccagaattttttaatgccgttaatcgcggagcgactgtaacgctcacgatgttcaacaacacccagctttgctaactgctgatacgcctgattagccgtcatccggataccatgctgttttaacagcgcgctcagtgccagcgtcgggcggcttgaaccatccagcgcgccagccggagcatcaatggcatattgtggcgccaggttaggtagtcccactgcctcctggagtttctggcacgcgcccagtaccgatgaattggacaggtttaactctttgcgcataaaacccagcagaatcacccccgcctgcatcttatcggcagccataccagaagatatttgtggcgcactggtaatccgatcgaacgtgcggatcaccttgagatggaaagatgggctgatccacattgcataagcaaacaccagttctttgcatacgtatgtaccttgttcagcaccaccgcgaacagtatttactggagcgatacccaaattttgggtatcactaccgccctgaaaaaagctaacggattgattttgttccgagggtggaattccgccctcggtgaaaagttgctcaatcagctcacgggtttgcttattatcaagccagtatttcggacgatatttctgctctccaccagcagcacggtgcaaatcgttaagacaatagcgcccatgaacgtcgcggcgaacttcgataccatcaatgaccattaaattattcatgcttctttctccattttcagtcggctgcacccgcccctgtttcaaatttcgtgatcgtgatttctaccttccccttcgggaaaactggtccccactccaccagcattctctttacctggctgtcgtcctcccagactcctgcgtgagtcagtgcgtcgaacagcgctttgttgtaattgtccaaatccctgatccgcttatctggcggatacaggatgatttctaccgctgctagttcagtcgatggcttcgggagacgtcgtaattgctcaatgatcgccacgcaggcagcgctctggtatttacgaccaacagcgctaatgaggtgacgaccggccagcggccccttgttaggggcgcgccagtaagtgttcacgctcggagggaatgggagtaccagcctcatgcaacctcccgccgcatgctgctgaccagtccaccagcagtagtaatgatttcgctggttggcatacgctccagccacagctggttaatgttcgctttcagcttgttctgctgcgatgcgtccagagaatccgccccctcaacctggttgaacaccagaccaacctcaagcggccagatacgcgaatccacataaggtaatactgctggcgctataatgggttcttcttgctctggcgccgtagtggctggtggctgaaccttacccgcggcaaattcgaccagtgacatgaacgccttccccttttcctccagttcggtacggctgatgtagctgaaacgctcgccgcgccatgacttatcgaagattgcaatggcgccagcaaagaatgcaccagtggtcttctgcttatcgtcggcagggacaaaccacacggggagatcgaagccaatacgaccgcggataaacatgatgtgatcggcgtcttccggccaccacgtttcacttgttgccgctttaacgaggaacacatagcgaccgcccttttcacgcatctccattgtgtgatccatgatgtgggtcatgccggtgatcgcctgcttctcgtggtactgagagcggctatagggtggattaccgaatgcggcaccgccgattgattccagcatttccgcccaatcttgtaccaacgcgttatcatcggcggtgtaccacacagggcacttagcgttatcgtcgtcagcaaagagatccagcgttaggggaccgaacatcgcattaatgccccaaaaaagcaggtctggtgtccgccactgatcgccgacttctttcagttcgtgtgctgatttgttgcgcagttctgccagcgcctggcaatatttattgctcattaagaccccacataattccctgacagataccactcactacctgatgcaacagactttctgctcttccgcaaacaccgttcacggcgcgccagaaaggcgctacgttccgacgggatatgactctcccggaatgcctccatccataccgtagctgcacgacggaacaaccctcccgactccagtgtttctgcctgacgtatcagatgcataatcacctgcgggtcgttggttccgacataacagctccgcacaggtttagtcccgatatctggctcctgatccggctgtatgtctgtctcaagagcaaaatgcctgcgagttttaccttcaaagcgatgagcaacacgcctgcactggcgtaacttacttgtcgactgcaggacgcttttacgcgggaaatctgcgaaagcattcgctatatcgctggaagtacatcccggatgggattcaatgaatttctgaacgtctcccataagactcatatcaccccctgaaccctgtcgggatctggctgtaatccacattcccgtagctggatttgaacatcggatcttcacgtccaggactaggtgcagcaggaacagcccataactccccaaaatgacgatcgggaccaaaaaacgtggtggcctgtttcacgaattgcgtgccgctgttccccgttgcagatacccatcccgcataacgctttacgccttccagcatggtttcagcatttaccccctctttcagacgggctttccaggctttgtaggctgctgattttgaatttccacctgcacgttttggatatgccaaccaggcctgctcgaactcaggtgaatattcctgccgggcaaaacagactgacgaagacgcgtaagcagatgcgccaatggtttttgattcattgactggttctttgactggttcaaaagagtgactggttctgggtgaatctccttcactaccccctggtgcaactcctgcactacctagtgaatttgctgcaccaggtaatgaattatttgcactcccccctagtgaatctcctgcaccatccagatgaaggagatagatattacttgagttacctttttcacctttccgggtgactttttttaccagcccggactcacaaagggccgcaatatgattcatcacagaacgtttgctaatctcgcactggtcagcaatatgctggtagctgagccagcactcaccctgatcgctggcattatcagccagcttgatcagaaccagttttcgcaatggattacccactcgaattttcatcgctttaaccatcagctccatgctcatgcagcacctccgagatgcttcatgtttttgccggaacgaaaggcaataagaggcatgttgacgcggtaattacgcccaagaggctcacagacaaccttctgacattcgcgatcgaccaggctaatacgcagaacgtacccttctggtgtgctgtaccactgtcctggacgagggcaatgaaaacgttggctggtgaaccgcttaaaaatattccggatcatttgcgcccccttacctctgaacggttcagtgtcatattgataaggctcgcaagcgccacagcgtcattgatgcggtcgtacaggcttacggccagcggagattccgctttttccagcatgggataaagctgctgtaaccagacctgatgaatggatgaaatgtaggaataaagaacgctggcattatgtgctgcatcgctcagcaccgatggaattgaaagttgtttctccatctggttaaaggcattgatgtatgcctctttgaattgggcggcgcgtttgcccgtaaaacccattgccaggaacgcaaaaccatcgcgggtgatttgatagcatgggagtttgcgggtaccgccgttgggctgatttattgaaatcgatgtaaacgcaaaattgcgttgacgaaatagagtggaacattcgagagattctattttacggataacatcagcgtgacgcttgatgaagtagtcggcaacagccagggaggaagtaacggcttggccgttaataattctaatttcaggttgagcgagggttgggacagtagccatagtggcagcctctatgttgaattcaatgaactcaccaccaaggctttccacgaccttataggtggtgagacgtacaggggtggaaataccggtcaacatagaacccggcccagccgaaactggccctgcacgccccaccataatttgggcgtagcaatgctcatgacaagaaaaaaccgcatgagcgcggttgtgctctatattgaattccgggtttccacgcccggcacccgctttatgaggtgcctgaacagtgtaacgtcccggaattgcagaatcaatgtgttcctggcgcttcacactcaacaaaatcacgcctgaatttccacaaagggctaaaacactcatgcggatagcccttgcgcagatagataacgcgctcagtttctggttcccagcgaatgacatggacataaagtccccttccatcccgaaaccagcggttaagttcctgcacgattcatcccccacggtcaggctgtgttccctgtggttacgcacgaccagactatttggtaatctgcattcatgacgcaacggccggtactcatacatccccggttgttgcgacaaacggttatttaccgttaaactgttcatgcgttggttttctccataaaatttgacgccacggcgcccggagctgcacactcgcgggcgtcacccttttctggcgcgcaaaaaactctgtataccagtgtcgaatgctgttgcagctttgcgatcgcctgatacaactcctcatcaatcacggctttttcatgtggctcaataacgccatcttcgatagccaccctgatttgctgggaataactggtgatctgctcaatcgcttccagcaggcgctgattaatatctgcgttatccacttcttccatatctgccagcggaacaaaaacgccacctgatgccctggctactgaatgtgccaggtgataggttcctccggcacgttgcagtaccagcgcccacccaatcgggaagatctgatcaccaccagtacgcaggcggttaaacagagcatctttggtgacatccagccattccgcagcttcttcataaccgccatgcagactggaaatcgtctttttaatcgcagccaccagccagcggggctgcttttcaactttccattcaggttcatgtcccacggatctactccttctgcagtggtggcggtcaaatcgccgaatcactaagctgatatctgtttggatacaaaatttgcatctcgctaatttctccggcgtaaaattgagccaggcgctcagcaagctctgttgaaggagcctgctcgcatctttcaacccggcttaatgttgcaggatcaacctgaacccctttagcgacgtgctgtaacgtataaccatgcgatttccgcaattttctcaatggtgattgcataaaacctccttcttttgcgtatatcgcatgttatttcatacagcaaacttgcgcaagttgatttgcacaatgcgcaaaaaattaatgtaatgaacgcatgaatataggaaaccgtgtcagacaacttcgccgcgcgaagaacatgaaaattgctgagctagcagaagccatcggcgtggatgccgcaaacatctctcgtctggagactggcaagcaaaagcaatttaccgaacaaacactttctaggctggctgactgcttaggtgttgatatagcagaactctttacctcagacccaaaaggtaatactgtatgtaaacacagtgatatgaggaaggattcagctaacgtgaaggatttgttccgtatcgagatactggatgtcagtgcaagcgccggtaatggactcattcagggcggtgatgttatcgatgtaatccatgctatcgaatataacaaggacaaagcactagctatgttcggtgggcgccctgccgctgagcttaaagtgattaacgtgcgcggtgacagcatggcaccaacaattgaacccggagatcttatttttgtcgatataagcatcaaccagttcgatggtgatggcatctatgtctttggctttgatgataaaatatacgtaaaaagactgcagatgatccccgataaattattggtgatatctgataacactaactacagggaatggagtattaccaaagacaacgagtgcaggttcggtgtttttggcaaggttctgataagccagacgcagtcactcaaacgacacaattaatagaaagcgtcgacaaggccaccattatggtggctttttttttgactcaaaattgcatatatcgcaattttacacttgcgcaatgtgcaatttaaatgtaatttgcactcatagagcagcgaacaggcaggacgcccacgaagtagccgccggtggcatacgaatgaccggatgattcgctgacatgtgtcttcgggaggggttgcggaactgggttgaccaccagcaacagataactcagccgacaacacggagccgtttaacccacggcgtcggagtgtaaataccgtaggggttgtaccgactggtcatcggtgccccgcccgaagatacctgtagccagtgcaagcgatattctggcggcccgttccattacgttagcggaaaccgccagctttttcaggagagcaacagataagagtttttccgcgcggtaaagcgcttctgttaagagagagaactcttatcgttgtggtgaatgcggctcagcgcacgcgggtaaggttgaagctgatagtcgatcctctgtagttaagcacccgtctggcgtgcaaccttcgccagataccgggaggcacccggcaccacaacgttattgctgtgtgaagtcttgtcggcgtccggctcttccaacaacaggaggaaggcgacagtgttctgccgtgacgccgacctttttacacaacagaaaagagtatctccgcgcgacgggctcattacccaatccacccggaaagctgttacagcaggtgctcttttctgttttgtggagaaaccaactggcggtggcaaccgccatcttgaggggttaacgatgaatgatgaccgcatgaccgtagtgcccgactttctgggcgaactggatgccggcgtgttcatgaacaaaatcgcggcagcgctgaatactgtcggattaggcgttctgaataacggcaataaaggcaaggtagtcctcacctttgattttgagcgcatgggaaattcagtcgaagagaagcgcgtcaaaattaaacacaagctgcagtacagcactccgacgccgcgcggtaaagcgtcagaagaggacacaacagaaaccccaatgtgggttaacaagggcggaaagctcaccatactgcaggaagatcagggtcaactgttcagtattaaaggcactactgacggaaagcttaaagcggctcagtgaaccgcagctaaccaattcactaccaccactttgatcattagttaataaggaatttttatgtctcagttagacagcggcacttttcagcaggtaaaagacctggtcctttctggctatcacctgaacgatattcaggggctggcttgcccgacagcattattacctgccggaacaggtgttgaaagcctcgaacgctttgctctggagcgtttccgcttccgcggcgccatgactaccaccagcattgaagactttgtccgttattcaaagggctatgccagtacaaccgaaaaagcacgctgctttattgatgctgaccatatgacagctcgctcagttttcaatattggtacgctggataaccccggtcatgcagacaacgttgcttctgtcacgctgaaacagactgcaccattccgcgccctgctccagatcaacggggaacgcctgaaacaaaaacagatcgccgaatggcttgaagactggagcgattatctcctggcgttcgattctgacggtaaaacaatgcagatttcacaggccgcccaggctgttcgccgcattacgatccaacaggcaacccagcaggatcatgaagatggcgatttcagcggtaagaaatcccttatgcaaagcattgaggccagcagcaaagacgttatgccggtggcttttgagttcaaatgtgttccatatgagggtctcggtgaacgtgcgttcagcctccgcaacagcctgttgaccggtgatgaacctcgctttgttctgcgtatcgtacaactggaagcgcaggaagaagcgatcgccaatgaattccgcgacctgcttatcagcaaattcgacggtgaatcagtagaaacgttcatcggtaactttaaagcgtaattgctctgcattaaatccccggcgccgcggggatttattgaagtgtaattctgttaattatcgccacccggcgagggattcgcacaaccaaaattcacgcggtgcagcgcgaaataaattataaggagaaccaacgatgagttttattcaaacactttcaggtaaacaatttgattatctcagcgcaactattgacgacattgatattgaagatatcgccgtggcgctttccaatatttgccgcttctccggacatctccctgaattttatagcgtggcgcagcattccgtactgtgcagccagcttgtatcaccggagtttgcctttgaagccctgatgcacgacgcagccgaagcgtattgccaggatatccctgccccattaaaagcgttactgcctgattatcgcgagattgagaaacgtaccgatcaactgatccgctttaagtttggcttgccactggaagaagccagcgtagtgaagtatgcagatctgaccatgctggcaactgaacgccgcgatctggatattgatgacagtattccctgggtaatactggaaggtatccccccgacagatttattcgaaatctacccacttcgccccggtcaggctttcggcctgtttatggcccgctttaatgaactgatggagctacgccaatgtgctgcataaaagataaagagtctgtagtgaaggcaatcagatcaagacttttgtgggagcgcgttgaaggcggtgcagcatgaaactggaaatgtacaccctggacggatcggtgattgttgatagcaatctggtaacacagttctatccagactacaaaagcggcggcgagttaacagtcatcgagactatttcagccaccggagaaactttcaccgtgagggttaaacactcgtttcttcaggtaacaagtgcgctggctacggcgtggagcgttgatgaaaagaaagctgaaggagcagctcaatgagcaaccgaattcgcaatgctcaggtattcgacgcgcgcaccggtgagtacccggtttatatgtacattcactggatcattggtggtgaacttgattttgatgccaattatcagcgcgggtatgtctgggggcatgaagagcagcaggcattcttaaacgcagttatttctggttttcctatcggctcagtggcgctggcaaaggcacctgactggtgttcgcgtgaacttccttacatagaagttgttgacggtaagcagcgtctcaccactttgaaaaaattcatcaccaatgagattccaatcatcctagctgatggtccgctttactggcgagacatgactcgtgcggagcaattggtatttgggcgtcgtccactcccagcagttgtgctggatgaggtgacgtacaaggatcgcttggcttatttcatggtggtgaactttactggcgttccgcaaagcgaagagcacaagcgacacgtaatgcaactaatggaggctgcccaatgagcaacatcgacaaacaggcgctacgagagcgctattcaccaaaacctgcacctgaatgccacatttgcggtgctgaaatgactatacagcgcatgtctgccagtcgaattacctatggctgcacgggcgcgacatacgacgataaaggttgccactacgcagaaggccgcagtatcgcagatgaccattatgaacagtctcgcgtcaccgtagttgatgtgagtgacccgaatgtgctggcgctgctggatgagctggacagcgccaacggttacgtcagcgcatacgaggctgaaaaatggcattaccacggactggctgagtctgagggggagcgggcagacagagcagaaaagcgcgtggccgaactggaatacatcgcgactgattacggtgtgaaatttcagaaaacacaggacgcgctgaaacatcaggcgctgttgcataaatcgcagatggaagccgcagaaaagcaagtggaagaattaacgatgtgggttaaacgactggccaattcactcagaaacaccaagccgaacagcaagttatacggtgccgcaatggactatttgagccgtaaaggattaatcagtgtggaggatgtattgagatgaccactattaccaaagaatggctacagcaaactatcgctgaatttgaaaacactcgcgacgatattccgtttggtctcgacgatgatgacgccaaaattttgttggtgctgaagcgggcgctggcatcgctggatgctgagcccgtgcgatacctgaataaattttccggtacatgcgtgacgttagagcagcagtcaaacgctgcagatgatgttgccgtgtatataccgctctacacagcaccgccagcgccggtagtgccggaagaggcttacagcgacgactgccctgacttatacgccagtcagccggaagcttgggctgctggctggaacgcttgtcgcgctgccctgcttcatggtgccgaacctgtaagccaaacttacgagttgccacaaacgcagtttgagcaggttgcagacctctacgaaatgcaatttgatgatgggcgcacctgcgcattccacacagatggtgcaaaagctgctcagtggttgctcgcatgcgatggtaataaggtgcaggaatacgtcaggcttgagcgctatcatgaggctcttattggtaactctccggtaattccggatgattgggttatggtgccgaagaaactaactgctgagaacggtgccaagagtttgctatccggtgagtttttagaaactacttttataagctttcctgaatgcttggccgacgaagaatgcgaaagctgcgacggcagcgggagaattaaaattgaggttcctgtcagatggacgacgattaaggctatttggaataaaggcgttgaacattttcgtagcagcaccgcaacaggggacaactaatttatgaataacttgatgatcgaccttgaaactatgggtaaaaaacctaacgcgcctgttgtctccatcggtgctgtgttcttcgatccgcaaagtggtgaaattggacctgagttctataccgccgttagccttgaaagcgcaatggaacaaggtgccgttcctgatggtgataccattctatggtggttaagacaaagcccggaagcgcgagcggctatttgcgctgatgcagtatctgttacgaccgcgcttattgagttcaatgactttatcacctgtcacgccgacgatttgaaatacctgaaggtatggggtaacggtgccaatttcgataacgttatcctgcgtggcgctttcgaacgtgccagcctcccctgcctgtggaattaccggaacgatcatgacgtccgcacgatggttactttgggtcgtgcaatcggcttcgatcccaaacgtgacatgccgttcgaaggcgatatgcacaacgcgctggctgatgccaggcatcaggcgaaatacgtttcagctatctggcagaaactgatcccgcccaccagcaacaatatctgatttaaaccgggtgcagccggttagatggagaagcaactcatgagcgatcgcttcctgactgaggaggaactggaagatgctacaggagcaagccagaagtcactccagaaagaagtattaacgctgaacggtatttattttatagaacgccgggacggttcaatcagaacaacctggtatcatataaatcacccagtttcgcgccttcttccaccagcagggtatcagcctgtaccaggcatgaattttgacgctatagagagttaacatgggtcgcaaacgtgcgcccggtaatgagtggatgccaaagggtgtattctttcgcccttctggttactactggaaaccgggaggatcaacagaaaatatagctccagctgatgcaactaaagctgaggtctgggtggcttacgaaaaaaaagttgagggtagaaaaaacagaattacattcacacaattatggcgaaaatttcttgccagtgccgattatgctgatctggccccaagaacgcagaaagattatctggcacatgagaaatatatacttgccgtatttggtgatgccgaagctaaagcaataaagccagaacatatccggcgttatatggatgcccgtgggcaaaaaagccgtgtccaggcgaatcatgaacacagctctatgtcgcgcgtatttcgttggagttatcaacgtggttatgttcctggtaatccttgcgttggtgtggataagtttcctaagcctcaacgcgatcgatatattaccgatgaagagtacagagcgatatataataacgcaacgccagccgtcagggctgcaatggaaatagcttatttatgtgctgccagagtttctgatgtattgaaaatgaactggaatcaaatactggagaaaggaatttttattcagcaaggaaaaaccggagttaaacaaattaaatcctggacagatcgcttacgtgatgccgttgaaatatgtcgtgaatggggagaggaaggccctgttatcaggactatgtatggcgagcgttattcttataaaggatttaacgaggcgtggagaaaggcgcgaaaggctgcgggggatgatctgggacgtcctcttgactgcactttccacgatctaaaggcaaaggggatttcagactatgagggaacggcaaaagacaagcagaagtacagtggccacaaaaccgaatcccaggttcttgtttacgatcgcaaggtgaaaatgagcccaaccctggacaggaagcgttgagcttttcgatgtgcgccagttaaaattctggcgtttttttctcaccgaattttctcattttttctcaacgtgattttcatcactataagaaaatcacgtaagtgcttgaatagtggcggagagagagggattcgaaccctcggcggagttacccccgcaacggttttcgagaccggtccgttcagccgctccggcatctctccgtatattgcaatgatgccaggtaatttggcattttaacagaccctattcgggtaattttgttcaagtgacgagtttacgagcaaaacgatgattaagtggccctggaaagcacaagaaataacccagaacgaagactggccgtgggatgatgcgctggctatacctcttctggtaaacctcaccgcgcaagaacaggctcggcttattgcgctagccgaacgttttttgcagcagaaaagactggtagcgctacagggatttgagctcgactcgttaaaaagtgcacgtattgcgttaattttttgcttaccgatcctggagctcggtattgagtggcttgatggttttcatgaagtgctcatttatcccgcgccctttgtggtagatgatgaatgggaagatgacataggtctggtgcacagccagcgtgtcgtacagtcggggcaaagctggcaacaagggcccattattctgaactggctggatatccaggactcgttcgatgcttcgggtttcaatctcattattcatgaagtcgcgcacaaactggatatgcgtaatggcgatcgcgccagcggcatccctttcatcccgttgcgcgatgtggctggctgggaacacgatctccacgcggcaatgaataatattcaggatgaaatcgatcttgttggcgaaagcgctgccagtatagatgcctatgccgccaccgaccctgctgaatgttttgccgtgttgtcagagtattttttcagcgcgccagaactgtttgctccacgtttcccggcactatggcagcgtttttgccagttctatcgccaggatccttctcagcgcttacgggtaagcgctgccgaaggcgactacggcgaggaatccgaacattaattcctcactttgtgggttaattaaccaattgaattggcgcgttaattttactgttgacacgttatagccggcccagtattatgcgcctcgttgaaacaattcctctgtagttcagtcggtagaacggcggactgttaatccgtatgtcactggttcgagtccagtcagaggagccaaatttagggaagcagacgttcactgacgtctgctttctgcatttatatcaactgattaaccccttcttcaggttcactctcgtttactaaaaaccactcgaagctatacccttttgctggtaaagctggttcgatttgcgttttaccagcacgcggagggaaccgtcatgtcactgactgatactaaagtaaaaaatgccagaccagcggaaaaggccgtcaagctcgctgacgggtttggcctctatcgattcaaaatactggcagtcaggctatcgctttaatggcaaacagaaggtgttttctattggggtttaccctgcggtttctcttgctgatgccagacaacgccgtgacgaggtcaaaaggctgctggatcaggggattgacccgaacgcaaaaaacaggctgatgaaaaaatccttcaggaaaagcgcgataaaacccgctcgtcccgtgtcgtcgccaaaagctgatgcaccataattctgcctatgatattgacggaaaacttttcgcctgcaccagaaatttatctgccatttccgctaccggcgtcagactgcctgtatcaaccattttcacaaaatatttcacgtctaaagttcattctactccctgcccttaatctctacggcgttatgtctcagaattatttgccaagtgcctgccagtttttcacgtttcatcagacgctggtacatagccattgcggtaaggtcacagcatttgacttgtgcaattacagacaaagttgcgccatgccggagcaaagtaggaattagatcaaaacttcaacgctttgttgtttttgtcagcaaacaaacgcgcaaccttatttccccctttgacaagccgatcgcacatcgttactatgcgccccgttcacacgattcctctgtagttcagtcggtagaacggcggactgttaatccgtatgtcactggttcgagtccagtcagaggagccagattttagtttcgggacatcctggcgagtccggagacgtttaaaaaacaagaaattatctttacccggttgatctgataaggtttgccgggtttttttgacatccatagtttttggggcttaatcgggcctcacggttcgttgagtaaatggagccccctcctatggcattaaccgataccgctggcggcacgcagaccgatccgggtacaggaaaaccgtcagaaaatccacccgccgctcccaataagcccactccaccgaaagaagaaacgccgcccggcgcgccggagaaatacgcgttcaccgcccctgaaggtcaggaactcgataccagcgcgctggcgcagttcgaaccagtggcgcgtgaactgaacctgacgcaggagcaggcgcagaagctggtggacgtctatccgaaagtgctggcgggagtgcaacaacagcaagcggagtcatggcagaagcaaacagaagactgggctgcggcagttaaagccgataaagacattggcggtgacaagctggcgtctaatcttggcgcagctcagcgggctatcgacacgttcggtaccaaagaactgaaagagtatctcgatggtacctgcgccagatctctggtcaatgctgcaccgtgacggaagcgattccacccggcacctgttaccacatcagcgccttttactttacgggctgcggcctgcaaagacgtccggctttgctgccgcgtgaccgtcaatctgcgccagaatccgcgatctttcgcgcccggcactcaaccggtgcgtcactttcgtcgcgcaaagcgacaaagtgacgcacaaccactacaccgcgccatgcccctgttttcggggttccggcgttcattcccgaatctgacacgcctttttggggccgctgtcagcaagaaagaagagaaaaagatcgataccgaggggggggctgatgccccggagaatttctgctcacgcaggcagcctgtaccgcgtacagtctgaaactccctatacctcaacaaactgccactccggcgtaaaggtatcgttctggcgcagccaaagagcatacgccggagactgttcgtgttctcaaaatcacaggagaagtgtatgggcaagttaggtggtgaaatgaaggcactggcaaagcactgtggcggtagccataaaacggtgaacgattgcattcatatcgtgcagcgtttcgatcaccacttacgggctttgaacgtccatatccagcgggttgcgcagattaaggtgcgccacattgaaagctatattcatgaaaggttggcgcaggggatcggcaaacgcacgctgcaaaatgaaatggcctcgctgcgcgctgttctgcaacaggccgggcgtaaacaggtggcagagcatgagtggctgactaataaatcgctgggtctggctggtgcatcgcgcagcgggacgcgacaggcgatcacgccggaacattatcatcatgtgctggagacggcccgcatgaaagctccgggactggcggcggcgctggaactggcgaggctgatgggcttacgttcacaggaagcggtgcagagcgtgcaatggatctggggcatggggacgggcgtgggcggtatgtggcgcaggtgtatgggcaaatttgacagctggctaagagcgagcagcggatggagcaggttaccaccgttcacagttagtgaaagactgggcggaggtggtaaatatcaggctgcattaccttcccccttacagtccaaacctgaatccgatagaacgaatgtggaaattaatgaacgaacatgcccggaataatcgctacttcagcagtacgcgagagttcagggacgcaatatctgtcttttttaaccagacgctgccggatatagcggactcactgacatcccgaattaaagatcactttcaggtgctcactcccgcatcttgaggtttattgggtatataatcgttaataatcatcagcgcgttattatcaaattaaaaacaacgcgctcgtaatacttaaattattcttactggtaactgaagaaaactctctcctgccagaatatgctcctcgcatcctttacattaactctttgtttctatagcatgaaataagtttcagggagttattattcatacaaggagaacatcttgaagaaaatattcataacaattatagtttcattatattgcgcgaatatatgtgcaaaacaatcccccagtacagaatccaaacccgttaatttcatcgcccaaattgaaaatatcgattttaataaaaccgccattagcagtgacctgaaacttttactcgccgaccgttattattttaaagataaaacaccctgtaatactaataccctttctgcgcgcgcagaatcaatgggactgacgacagaagaatatattaataaaatacgcagtttaagaccggctattctcgatgaccgttatttttacctgacggtcgatcagtgcgatgctggcggcacgcccatgctgactggaatcgagctatgtaccgaagcgctgtgcggtgccgaatacatgaaaagatcgtctgacttgtggctggatgatgaactgcaaccgacggttaaacgtcaggcaacaacagtagtccatatgcccctcccctatgacaaagagaaaaaattatggaaagtcaccggctggtatctggaatcctcagaagaaacaggggaggtgatgcagagtaaacagatagcctttgaaggctataccaacgaagaaaacttcgctaaccgacaacgtgtttctgtatttaaatctttctatgaaagcggcaatctcaaaagtatttatcattataatgcgcaaaataagcgtgacggaaaagctgaaacttactttgatgaaaaagacaaaatagcggaaacgctgacgtttaaagatggtcaacccgaaggggaatacatcgtataccatgaaaacggagccgttgaaagtaaacgttactttgcccaaggtaaaattaaagatggcgaatgcccacatttttatgataacggcgttttaaaacaaaaacacagctatttaaatcagaaactggaaggcccggcatttgaatatttccctgatgggaaaataaaggggaaatattcatacagtaaaggcaccattgtcggcaccagtacggaatattattctaccggtaaaattcgtggtgtttaccacagaaataaccaaggtgaaaacgacggaacgttcgaacaatacagtgaagagggcaaactcctttctaaagcgacctataaaaatggcaaacagctttctgctcagagctggtatgaaaatgggcatcccaaagaagaatcctcttttgatagtgaaggccgtaaacatggtgcggtcaaagaatggttcagcaacggaaagcctgcctcatccaaaatgtataaacatgatgtgttagacggggatttcgaaaagtggtacgaaaatggtcaccgcgaatcagtctatccctataaaaacggtatgctaaatggggacgctaagcactggaatgaacagggcaaactcacctataccaccgaatataaagacgataaaaagcagggagccgatcgccgctggagcgaacgtaccggtaaacttgttgaagaggttatgtttgctaatgatgaaagaaacggcctgaaaagagagtttaacgatcgtacgggtaaggtcttaagtgcgctgccctatgtcgatggcgacaaggaaggtacagaagaagcctatgatgaagacggcataaaatacatccgttgttaccacaacgatgaagagctttcagagctatatgcgccgactgacgtcaccaataaggcaaagcagggtgacagcactgcgcaatatcatttaggtaagtatgagtttgaatgcacaaactacgatgcggcgatgaaatggttaactcagtccgcagagcaaaatcatcccggcgcgcttctctttttggcctatgcgtacaacgacggtgatggcgtagcgcaagacagtaaaaaatatctctcctatttattcaaagcggcagagcttggcgaaagtgatgcgcagttagaagtgggatatttaaatcttatcggcgaaggaatgccgaaaaacctgccggaagcctataagtggattaaaaaatccgctgaccagggaaatgctcaggcgcactataaccttggactcatgtacaggaatggtgatggcgttgagaaagacctcaacaaagccaaacttcatcttacagcggcggtaaaaggcggcgtcaaacctgcactggcagccttaaaggaattaacgcctcaaactaagtaaatatgactttgctgtaaagaggctattcaaacggaactgaaaggatacacgttgctatgaaatttaaattcgccacattactcacagccgccacggttttttactcttatcagagcgttgcacaaagtcagcaatcgcctgatgtctggtcagttgtcgaacagaaactgcaaaatgccgtccctttaaatgaaaacaccacttttaaatcgcaggcagcctggtttgaattacacagggaactgtttatgtacggcccgatgagccgtgcggatgcattactgaaaaagctggacacacaatcgaatgatgcgaagttttcgctaaaccatgaggcctcgtggatcgctgaaaataatagcccggatgccgcgatggttttcctgtccaaaattggtctcgataaaccgtcgagcattaccgcctacgagagctacgttgatggctgggttaatcgcaaacagcctgaaaaagccttagcccttcttagcaaaaatgccgacgcgaggaatttttatttagccacggttttagaatcctgtcactcagagcctgataaaaccgccgctatttataatgaaaattacgctgataaaattgttgttccttatactcagctaaaaatgctgcttattattgcgaagcagtaccatgccaagggcgacaccgcaaaggcgttggtttacgcagatagcgcgctgaaaatgtttgatacggctattgctcaacaaccgagtgctgaagcctaccgttatcaagagtatctcgacctgatggagatctattacgccacgggtaataaagagaaggcgatggcgttgtctgcgagattgcgcaaagcaaccggcaataaaggaagctatttccagtattcattaccgggattgctctctttttataagaaaaacgagctgacacagaattatcaggagacgctttcaacctgtgtgacgcaggtcgataaaatattcaattttgccccttcgccgcgcattgaaatggagctgattgatttattaagcaagcttgatgatgttgcgctgatgaataagcgtatcgatttgctgatgagcgcgccggaatatacctgctacgacgacaggtattgctacgagtacaaaatcaaagcgctgaagaatctctttcagcataagcagaatgctgtggcggaaaagcatatcgcaaccctctccgccgaggcgcaaaccctgacgttcgccgaatgggaagatgcaacaaatgaaataggtgaagtactcaaagaaattggccatcctgaggcagcgcaaaaattagccgtcagcgccgaggcgatttacctcagccaagcaaaagcctggcctgatgaagatatgtcgcgttcctttcaaagacttgcagagctttacggctatggcaacgacacggtgaatgccaaacgggtgttacaccagcacgttccctctctcgaagaggaggcgatgatcgaccactacatgaatgcaaaacagtggagtcaggcaagggaattgatgattaacgcagatagggtcgataataaaaacctgatgctgttacgccagatttgttctgaaaacacgcccgagtgtcaggaacatattacctttacgctgaaaaaattaaccacgcaggcgtcgattacccgccaggacgacaccggtaatcagcagctttatcagattgggaatatttttcacagattgggtatcataccgggagcggaacagcaggcgctgattcaggcgttgtataacaaggccgcagagcctaaaaaagccacgccttaatcgatttacccgcccggccacctttctcacatgcgggaaggcggcgggcgggaaaaatcaatcgcggaagtttttgaactggaacggctggcccagattgccgccgcgcatcagcaccatcgctgcctgcagatcgtcgcgggatttaccggtcacacgcactaacgtaaattcgaatccaaacccacagagattaccgcaagatattaatgttgacccaacaccgcctgccggaagacccgcgctggaacgccctgcacgaggagttcagctttgacgacgacgacaacctgctgggcatgaacatgccgcccgaaggtggcgagcatcaggcgaaagtcaaaggcgaccgcctgctgctacagggcagaccaccactatgagtacgacgagttcggcaatcccatcgctgaccgctggggcaaggcgcagtgccggaagcaccgatttgaatggaacggcgagcaccggctggtgcgctttaccgacgtgcgccactatgatgatgaaggctttccgcgccactcgtggcgctatgagttcgataatggcgtgaccaccctatatccctgtccgacgcgaaaatcctcagtatcaagccttctgataatccctttaagctgatcgattctcacggtcggtatctgcttgttaatccgggcttgtgggtccaggcgctcaaggagcgtgaagtgcggcgcaatgttttcgccttccggcgcgtttcctgacgtagacgcgattatcggcgacaggtctccggcgatggtgatgaagccgcggcacaataaggccttaacgggatacagaaccgcctcccgctaaggcttcattcagccactttccatatcacataaatacgcctcttccgctcctgtccagcagcaggcgacagctcatttcgttagcgaaacggtggctcattaaacgtgcgtaatttacgtgagtgcaaacgatcaccttctgcgcgtagtaaatcaatagcacgaataccaatttgcaaatgttctgaaatagccccctcataaaaccggtttgcctgcccgggcagtttaatttcaccgtgtaaaggtttgtcagaaacacaaagcagcgtgccgtaaggcacgcggaagcgatagccctgggctgcaatcgtcgcgctctccatatcaatcgcgaccgcgcggctaaggttgaatcgcagcgccgatgcggaataacgaagctcccagttacgatcatccgtggtgacgaccgttcccgtgcgcagtcgctgtttcacctcttcaccgggcattccgctaaccgctttggtggcgtcgtacagcgcacgctgtacttccgcaatgcttggaataggaatatcaggcggcagaacggcatccagcacatgatcatcgcgtaagtaggcatgggccagcacataatcaccaatcgcctgactttctcgtaaccctccacagtgcccaatcataagccagacgtcaggccgcaacacggccaaatggtcgcaaatcgttttagcatttgaagggccgacaccgatatttaccagcgtaatcccctgcccatctgccgttaccaggtgccaggcgggcatctgatgcttcttccaggccagatcggaaatagcctcttccggcgcttccgtttctgccgtgatccaaattccgccggcacaggaaagcgcgatatagggactgtcaggatcaagaatttggctgcatccccagcgcacaaactcatcgacatagcgggtgtagttggtaaacaaaacgaagggctgaaaatgttcaaccggcgtaccggtatagtgccgtaaccgggccaacgagaagtcaacacgacgcgcgtcgaagtgcgatagcggatagaattcgccggggtggaacagaccgtctgccgtctcatcgccaatctgcgccagttctgtggtaggaaaatggcgcgttagcccggcgctcatagaacgatccagcgtcagagccgagccatcgatcacataaggatacgggatctcatggtgcgaggcctctaccgcaatatgcgcgccataatcatggtaaacgaggttaagctgttccagaagataagcgcgaaatagcgcaggccgcgtaacggtagtggtataacagccgggatgagtaaagcgtccaaaagcgcgtgttttaggcgggttcggtgtcgcgccatcccagcttacagacagcgaaggataaacaaacagtccgttaagcctggcgtggggatcgggcagcgtaccgttatcaacatagtcagcgatggcttcacggagcgcgttaaccgactgctcgtatagctcctccaggcgatccagcgcctgctcgggcgttaggtttgtgcctttattttccatattattctccttagcgttcacaggtgaggcacgtcattcgatagtatgacagcaaaggaggaaactaaaggggttagcgtaagggtggcgacagtaaacatgaaccctttaaaaagaaaagagaactatcttagcgccaccatcatcgctcaaaaagaagggtactggtacagccatttgttaagttcattacaattagtcatataaccatttcccggcttttgctgactcgatcagcatgctgatagtgaaatctgggacgggtacaggttccgttttcttgaacggatgccatgaaaaagggtgattaggaaaataggtttctattctgaagttacctcgctcgacattgagttcctcgaagaatttattcatgagatcttcggcttcaagttcatcaatgctcagatcagtatcaaggtcaatctctggtgttaattccacttgcttaatgttgaaaagatatgtgccagcataaggccgtacaagctcgtaaacttgctgttcaatattgtctaccataacttatcattgccccgagcaatggtattgtagtcgcgtatagtgcaatatgttatttgtgacacatctgcggcaaggataatttccccgatcaaaggaatggaacgtccaacaaacggcgcaatgttacgaaccataacacgtctggctgtccatggggtgtaaccgcctaaccatgtcggaagggatattccaaagggaaattttgactttttaaacactgcacgtgcagtcctggacgcgtatgatgtgcctttagtcgctccagcgggtttcgcccttgtccaaagattattacgacctgatgccaaagcaacaacagccccgaaatctgcaacaccaatcccaaactggcttgcggtattctcacaaaaaatcataacagaagttcggcagcagtcagattggattttcctgcatagaagtatgttccatttagttcttctactgtatccattagaaactctatagttactattttggtttacttattgtacatccttgtttcgaatgaaagaaatcaatcttttgggaaagaacggatcaagatcactggaaatatctgaaatcagatgaaagagacagtcgcgattcccaccaggggcatcacctggcaagcttgtgtgatcgctccgtttgaaccgaacacatctatatgtcagcatactgatacgggtttgatcttgcggatagcggtatcggttaatgccatacgtaggggctccattttctcagcgaaccgtgaagcctccgattaagcccccaaaaaccatggatgtcaaaaaacccggtaaaccttctcaggtcaaccgggtaaagataatttattgttttttaaacgtctccggactcaccaggatatcccgaaactaaaatctggctcctctgactggactcgaaccagtgacatacggattaacagtccgccgttctaccgactgaactacagaggaatcgtgtgaacggggcgaatattaacgaggtgcccctggcttgtcaaagcctgttttcacaaaaaaagttcgtttgctgctttattccacacttcggttaaaattcaccgtttcctgatgattttcacagcaaaaagcgcttactccctctttacgcgcgggtatctccacagccagcgcccgcttatcagacgccagtaaaacagtgcgccacgcacggcccagtcaagaaacatccccagccaaacccctacaacccccatacccagcacaataccaagcgtataccctgccacaacgcgacagccccacatccccagcatcgatacccacatcgcaaatcgcacatcgcgcgcgcctttaaaacccgacggcaacacccacgcggccgcccaaattggcataaaggcagcattaagccagagcagaactttcactacctcttttacgtcctgctcctgggtataaaatgaggcaaacagacccgcaaacggcgccgtcccccaggcaattgccgtaagtacgatagtcgacatccagaatacatggcgcagttgacgctctgcctgaccaatttgcccggtaccaagacgcttaccggtgataatagtcgacgccgaaccaagggcgttacccggcaggttgataagcgccgccacggaaaaggcaataaagttacccgcaataacgttagtgcccattccggcgacaaacatttgcgtcagtagcttgccaccgttgaacagcactgattcaatgctcgccggaataccgatacccatcacttcccagataatgccgaaattcagcggcttcagatagcttttcagcggaatgcgcagcgccggattaaaaccaatcatcagcacccaaataatcgctaccgcgccgatgtagcgcgaaatggttaatcccagccccgcgccggcaaaacccagcccttgccaggagaaagccccgtaaatcaggatgctgctgataataatattgagaatgttcatcccgccgttaatcatcaacgggattttcgtattccctgccccacgcagcgcgccgctaccgattagcgcaattgccgcagccggataactcagcaccgtcagttcaaggtacgttaacgccagcccctttacttctggcgtcgcctcgcctgcgacaatattaataatttcactgccgaaataatgaatgaccactgccagcacaacggcaaatagcgtcataatcaccagcgactggcgcgccgccgcccttgcgcgtcgcctgtcgcgcttgccgaggctaaaggcgaccaccaccgtagtaccaagatcgatagccgcaaaaaaagccataattaccatattaaaactgtcggcaagccccacgcccgccattgcttccttgcccagccaactgacgagaaaagtactgagcacgcccattagcaaaacacaggtattttccagaaaaatagggatagcaagtggggtgatttcacgccagaacaacactttgtagctcttgcgtttggcataccagggcgtacggacgacagcctggcgtaaggcagtggagacgttcaaaatggaccttaaagaagagagttgaaaccacatttcaataatgagcgagaaatcgtaaggctgcaaagctttttgcagaaaaaatgtctgcaaatgcaacaaagtgatgagataacccgcaatcgaatctgtaagaggttaaatggggtttgacaaaaatttttccgccgctagtatacgaccccacacgattcctctgtagttcagtcggtagaacggcggactgttaatccgtatgtcactggttcgagtccagtcagaggagccagattttagtttcgggacatcccagcgagtccagagacgtttaaaaaaacaagaacttatctttacccgattgacctgataaggtctaccgggtttcttgacatccatagtttttaggggcctaatcgggggcctcacggttcgctgagaaaatggagcccctgccatgacactcactactaatacagatactccagcccatgaaaaccagcaatgcgacaggatatttaaaggccaggcctgcccgcgctaatgttgaccggcattccggaacggcgctccagcacctcattaacccgcgaagtatcaacgtcatcccctttgataaacgtgcgcagcactggcgtaacgggcaatggaacttttttgtctgactcaaattcagcacggttgcgagaaagcggttcgtgtacctccagccaacgactgccatccggctctaccgaaaatttaacgggcctgtcgataatctgaacgcgggttcctacaggaacatggtcgaataaatatttaatatcgtcattgcgtaaacggatacagccctgactgacgcgaaggccaatgccaaagttagcgttagtgccatggatggcatataacctgccgatatatattgcgtatagccccatagggttatccggccccgcaggcaccatcgcgggcagcgtttttccctctttagcatattcccgacgcgtattagccgttggcacccaaaccgggccatcttgtttgcgttcaaccgcagttacccagttgcgcggcgtttcacggccagcctgaccaataccaataggtagcacctcaaccgtattcgtgcctgcgggataataataaaggcgcatctcggcgacgtttaccacaataccttcacgaacggtgtcaggcagaatcaactgctgcggcaccaccagtgtggaaccagactgaggtaaaaacacatccacgccgggattcgcttcaagcatattactcagcccttgaccgtagcgggcggcaaatgactctaagggctgagtattgttctgcggtacggcgattgtgacaggctgtcctaccagacgactgccttcgggcggcaacggatagcttatagccagcgagaaatggcttaccaacaagacgaaaaacggaaaaaaaggtgtgatacgacgcattatatcccttcctttgtcgcggcaggtgtgcgttaagtatagcttttttctcacatggctggtgttgtgcgcccgggttatgttgcgtttgcgttcccctccggcaggacaatattactggccgccaactcccccatgttgtggaacatggcgcacgcggcttccacgatcggcatcgccagcgccgcgccgcttccttcacctaaccgcatcgccatatgcaaatagggttccatagacaaatgcgcgagcgcgatgcgggcgcccttttccgccgaaaagtgcgacgggatcagataaggtctcaccgcaggcgcaatctgacaggccgccagcgctgccgagtaggaaagaaagccatccagcaatacgggtaagccacaccttgccgcgccaagcatcacgccggtcatcccgaccagatcaaaaccacccaccttcgacaacacatcaatgccgtcgcgcggattgggctgattaatcgcaatcgcccgccgcacgacgtccactttattatcgatgcgggaaggcggaagattcgcgccaatccccaccacctcttttgcatcacttcctgtaaaaacgctgaccatcgcggcggctggcgtagtgttcgccattcccagctcccctacgccaaataaggtcacgccgcgttgcgccaggtcgcaggtgtagcgggaaacctccagcaaaagcgcctcagcctgcaagcgactcatcgccgggccaacggcaatatttccgcagccgcgcgcgacgcgcatattaactacgccaggaataggttcggcatcaataccgacatcaatgacatgcaccttcgcaccggcctgagcggcaagcacgcatacgccggttgttccccgcgtcatattcgccgcctgaatcgccgtcacgattttgggcgaaaccgctacgccttcatcccagacgccatggtcggcgcacatcaccagcaccgccttttcacctacctgcggcgtaccgttaagacccggcatacccgcgagctgaacggctaaggtttccagtctgcccaggctgcccggcggtttgagcaggccgtcaatatgttgctgcgcacgcgccatcgcctcggcgtccggcgcaggaatgtcacggagtaaagcgtgtagtgtctgcataagatgtctcgtccgtaataatcggctcataacagagccagcagaaagatcaattcaccaagttcgatcgccgcgcccagcgtatcgccggtttgaccgccaagcgtacgtttaagcaactggccaaggatgaaaatcgccgcgcatgtgaccaccattgcggccaacccttgcataccaggcagtaataccgtggcgacgattaccgccaatcccagagtaatgcaggtttgccgtccgctgactttaccgataaatacattgccaagcccctcttcacgggcgtagcgatgacggtacatcaataaaacggcgctgccgcgtccggccgcacaggccgccgccaacgccgccaacattggcgttccacgtaacgccagttcgctgaccaccagaatttttgccagtagcacaaaaataagcgccagcccgccatgggttcccagacgactatcacgcataatctccagcattcgctcacggcggcgcgcggaaaaaatgccatcgcaggtatcggccagcccatccaggtgaaaaccaccggtcagcagcgccagcgccagaatacagaacaacgccgctagcggaataccacaccagggttgcaggaggatgaaaatcaggccgcttacgccccccagaatcaacccgataaagggaaacatcacgatcccacgcgaatactgctcgaaatccagtccctgcgaccagcgtgacggcacgggcaagcggctaataaaagcgagcatggcccaaaacagcttactcatttaattttgactccaatacctgagactaccagccagacctcatccgccgctgccgccagtcgttggttgacccgaccggcaatatcacgaaaatggcgcgccagacggttttccgggacgatccccattcccacctcatttgtcaccagtaccactttcgccgggcagcgctggcaggctgcaattaaaatctgaatttcatcgtcaatggcgcgctccatcgccgcgtaatcccactgttcgggatcgttctcgcctcccagcgcaaacagcagattcgtcaccatggtggtaatacattccagcaaaatcgcgtcgtcaggggcaagatccgcggtaatcaacgtatcaagatgccgccagcattctgcggtccgccagtgtgccggcctgccatctttatgatgctgaattctcgccgccatctcgtcatcaagaatctgcgaggtggcgatatacagtacctgcggcgcatcgccaattaaggcttcagcatgacggcttttaccactacgtgccccgcccgtcaccagaatcatcataccggctcctgatgttgttgcatgatggtataaattttatcaatatcaatatgttgccgcatcgcttccgccagcagatcaaattgccgcgctttatgatccgcataacaaaaagtcgtttcccacggcgcaagcccctttcgcgcccgtaacccattgaccaccgcacgggtaaaggcatcgctgtcaaacaggccgtgaaggtaagtgccaaacgccagtccgtcggcggtgaccgcgccatccgccacagagcatccatttttctgtaacgtcatggccgtacagcatccttcctgcagcaccgtttcccccatgtgaatttcataaccgcgtaccggtagccccgccgcggcagccagccagccgggcagctcgcctgacattgtcgcgttaacctgcgtcgtggttttatcctgtgcaaagcgagtgattgtattaagcagccccaggcccggctgcgtacccagccccgactccacctcatccacaatggtgtcgcccagcatctggtagccgccgcaaatccccatcaccggcacgccctgccgatgtgtctgcaataccgcatccgccatcccgctttcgcgcagccaggcgaggtcgctcagcgtattcttactgcccggcaggatcaccagatcaacgtcagtcaacgcttccgggcggcgaatatagcgtatgcgcacatccggctgcgccgccagagcgttaaaatccgtaaagttagaaatatgtggcagttgcacaatggcaatagtgatatcacggggggcgttaccgcgatatttatcgttttgcagcgcgacgccatcttcatcttccagatccacatccagccacggcatcactcccaggaccgggacgccggtaagcgattcgatttgttcgataccggaatagagtagcgccacgtcgccgcggaatttgttgataatgacgccctttactctgtcacgctcctgtttatgcagcagcgccagcgtgccataaatagcggcgaatacgccgccccggtcgatatccgccaccagaataaccggacactgggccatttccgccattcccatattgacgatatcgcgatcgcgcagattgatttccgccgggcttccggcgccttccagcacaataacgtcatattcctgcgccaggctgttatagaccgcaaggatttgctcacgcaaacgcggtttatagtcatggtaactaaccgcatccatattggtcgccactttccccatcagcacgacctgcgcctggcgatcgctggtcggtttgagcagcaccgggttcatacgcacatctggcgtgatccccgcggcttccgcctgaaaaatttgcgcccgccccatctctttaccatccggcgtaataccagaattaagcgccatattttgcgatttaaacggcgcggtacgcagaccatcctgataaaaaatgcggcataaacccgccgccagcacacttttgccgacgtcggatgccgtcccctgcaacataactgcctgcgtcatgacgcctccctgaatgcgcacttttgcattcgatgaaaaaactccgtttctgttttacacagcggcagtcccagttgagtatgaagtttgaccagccagggctgggttagccccgcgtgttccatcgcttccgtacacgcgaaaacctcgccaggcgcgccatgcgtcaggatctggccctggcgtaatacgtatacggcatcgctaatttcataaataagatcgatatcatggctggagataatgacatgattgccctgcgccacaatccgcctgatgatagcaatcatctgagtgcgccctgcgggatcgagaccagcagtgggttcatccagcaatagatagcgcgcctgtagcaccagcgctccggcgatagccacacgttttttttgcccatgactcaaacactgaatgggctgatggcgaaaatgttgggcgtcaaccagcgttagcgcctcgtcgacgcggcgcgtgatttccgcctccggcacccccaaattacgtaaactaaatgcaatatcgctatcgatatcagtataaaaaatctgctgttcagggtcctgaaaaaccgtcgcaacttgctggcgcagcgccagtagtccgcgcttgctgtaatccagcggttttccctgccacaacacggcccctttttgcggacgcaacaagccgctcaggttcataaaaagcgtagacttcccacagccgttcgcgcccaccaaaccggtaacaggcgaaagcgaaaaatccatatttaaccctttaagtaccggctcattctgataacgaaaccacaggtctgaagtggcaagcataatagtccttacaggtgaaaatcaccctgatacagtttgatatccagcgtggtggtcatttgctgataacgcattaacacccgcgtaaacaggagtccagccagcatcgccagagatcgatagccgttcggcaggctgcaataaccaaaacgcagcgtttgcgcacgacggattgccaccgcctcatccagaagaataaagagaaagcgccacgttaacaggatttgctcggtaagcaggcgtggaatatgcgcgcgcttaagcaagctaattaactgcggaaacggtaggttcatcaccagccacaacgtcgcggacagcgccgtcaggctacgccagaacgtttcattcgccgtaaccacgcccgcacgggtaatcccgatccagtacggcccaacagatatgccagccagcagcatttgcggctcgcggctgatgctgaagataatcgttatcacgccgaccaacaaaaatccaaaaggtatcgccatccatcgacaccagcgccagagggatatgcgcaatagccaacagctcaatccggcaatgatcagcagctcaatgccctgccctacaggcggcagaacaaacgccagtatcatcatcgccagccacagcaaaaacttgcgctgcggcgcaacgtgtgcccagcggctttgatagctgagtcgatcaagcccggtcatcacggcgttgtttacctttgcaataccccaggatataaaaaatcaccgccgcgccaagagagccctgaagggtaaacagcaggctttcaatttcaccgctggcaggttcatataacggctgaaaccagggtttatactgcggcgcaatagcctgaatctggctttccgcttcgccgtctgaaccgccatattcaccgccatggttaataaaaaacggcagaatcaccagcgccaccaccatcgctaacaacatcaacgtttttttcattttaatgtccttgtacggtaatcacttgccgtttggttaactggtcataaatcatgacggttaataaaccttcagcaatggcgacaggaatctgtgtgaggcagaaaatccccataaacttcacaacagaccctgtcgctccggcatggggatcgggaaacgcaacgccaagctggactgaagtcacaaaataggtcgccaaatccgccagcatcgcgcacagaaaaacggcgacatcacggcgcagtccggcacggcaggccattttccacaccagataaccgacaaccgggccaatcaccgccatcgacattccatttgcgccaagcgtcgtcaggccaccgtgcgccagcaatagcgcctgaaacaacagcacaaccgcgccgagaatcgccaccaccccgggcccgaacaagataaccgccagaccaacgccggtcggatgtgaacaactccccgttaccgacggaattttgagcgcggacaggacaaaaataaacgcgccgcacagcgccagcagtaccttctgatgattatcctcctgcacaatacgccgtaagcgcaccagtccataccacaagcagggtaaaaacagtagccaccaggccagcgcccacactggcggtaaaaagccctccatgatatgcatcgcaaacgcctgttgcgggacaaccatcagcaatagcgctgcagccagtccactgaaagacaactgtcgaagctgctgttcaagtttcattctgcatactcccactgtttattgaccagaatggtcgaaaaatagggcaacggtcgatcatcgttgacctcgtggagatggcgccagcactgctcgccgggcagtgtggcctcggacatcattaaggcgcattccagcaggccagcctgcgccagcaaagctttaatacgggcgaaccggccatacactttcatcaacaccaggctatcatgctgttgtagcgcctgggctatttccgcttccggcgcggtacaagaaataaccgccagcgattgccgttctatggcgagcggcattttcgcgcgggcggctatcgcggcgaaggacgtgacgccggggacaatctccagccactccgggcagccgattcgctggagtaaaaaaatccaggtactgaatagcatcgcatcgcccagggtaataaaaccgacctgtttacccgcttccacctctgcggtaagcgcggcggcaacctcgttccagaccgcttctttctcggcgccgtcagcgctcatagggaaatggcaacaacgtacttccgtctgctcgccgagatagtcgcgcacaatcgacagcgccagactatcgccccccttacgaccggcgggcgcatacagaatgtccagcgagccaagaatccgcgctgcgcggacggttatcaggtcgggcgcgcctggcccggtacttaatgcgtataatttaccgttcatgccgcctcctctaccgccatgttcagcgcctggtgcaaatgcgcgacaaacatcgcccggatagccgggttttctcccagcccgctcagccacggcgtcgccggaatgcccgccgcgttaaagcgcattttccatgagtcgccgtcgtctgaagccatatcattaatggcgtgatcgcccgccaccagcattaatggcatcaaatgtacgccggtgacgccttcgtcacgcaggctgtcgatcaggatgtcgacctccgggtagctttctacggcgccgacgcgcgccggaaagcgctgcgcggtcatcatatgatcgagacaggcataagctgcgaatgcgtgatggctggcgccgtggcccataaaaacgactttctccgtttgtctgagcgatggcatctgttgtcgcaacgcctgcattagctgcacataatcgttatggctgctcaacagcggcacgcccagcgtcaggcgagtgaataacggacgcaagagttgtacttcacggacaattttttcatattcgtcgccgttaataatgtgcaacgactgaatcgccacgtcctgatatccctgtgcggcaagcttttgcaaagcctgtaatggcgtatcgatgtcgataccgtcacgctggcgaagcttgcgaatgatcattccggaagtgaaggcgcgaaacaggtcgcgatcgggacaggacgccgccagatcacgttcgcacgccacaatgtttttttcacaggtgtcgtgatagctggtgccaaaactgaccaccagaagcgcttttttcatttttactccttagctgcggccagccagcgcgataaacgctgcgcaaaggcggcctggctttccagtaactcatcacccgtcacaagcggcgtcgggcgcgcaataacgatgcaaggaatgcccgcatccagacagggctgaactttttcctgatatcccccctccgcgccggacgctttggtaatgaccacgtcggcccggcactggtggtaaaacgcggcgttaaaatcagcgctgaacggcccacacagagcgaaaatttctccaacgccgaaccccagttcgctgcagcgttgaatcacctccgccacgggcagtacgcgcgccagcaacgttttttccgccagcccggcacgccagacggccagatctttactgccggtcgtcagtaacacgcgcggaccaaaacgcctcgctatctcgcaggcatcggcaatactgcgcgccgtatagagaagcggatgcgtcagattgctaagctgctccggacgctgataacgacttaacaacacgcctgccgtttcacaggcgcgaaggaggttatggctgaccatttctgcataaggatgcgatgcatctattacccagcgagtacggttttcttttagccaggcgaccatctgcccgtactccagacgaccacagcgcacctgccctttaatgtcgcccgccagcgcttttccggctggcgtcgccacggataaggtgtacgcgacgttcgccgcatccagttgtcggcataacgcgcgcgcatcgctggtgccgcccaccaccagcacatccccctcattcacagcgtgtaacctcgcggcgttatcatcagcccatcctgaacataggtcgttttattaccaacgatgaccagactggtcatatctaccggttcaaaatccatatcgccgagcgtagtcagccatttttcctctttcttacgtccggcggatttcaccacgccaaccggcgtttgcgcgcttttactggcggcaagcaggtcaaacgcgcgcgccagatgcccttcgcggccgcggctgcgcgggttgtaaaaacagataacaaagtctgcctctccggcggcaacaatacgtttttcaattaccggccacggggtcagcaggtcgctgaggctgatatgacagaagtcgtgcatcagcggcgcacccagcagcgaggcggctgcgatactggcggtcatccccggaataaggcgaacctctacatccagcttctgcttgctcaccagctccagcaccagtcccgccatgccgtaaataccggcgtcgccgctgctaatcagcgccacgttatgcccggcctgcgccagctcaatcgccgcctggcagcgttcaatctctctgcacatcccggttttgatcacctgcttatcgccggtaaaggctttcaccaggtgggtgtaggttttataaccgacgacgatttccgccgcctgaagcgcctcaatcgcctccatcgtcatcattgcctgcgaaccggggccaataccaattacgctcaacatcagtgtgcaactcctaaagtaatagtgacgccctgttctcgcagggtctcgcctaacaattgtccctggcttaataaccacgctgccgggccggatacgctgccaacgcccaccgtttttctgacgaagccagaaccgggaaaatggtgttcgaattcgcgtaacgcttcggcggtaaaggttttaaaaggcacgcggcagcaggaggcgagctgaataagccccggctccccttttttgagcgtgacgctgccaatcgcttttaacgccagcggatcgagtttctgcgcttcaagctggcgcgccagtaatgtcgctaacaggggaaatggcgtatcgcggcggcagccaattcccgccaccacgcgctggggcaccagtttccagtgcggtacgggaagctcagggaggtcattacgcaaagagacgcagataagcgcatccagttcaggcagccgctgcaaatcatcaacagggataaaaccgcgaatatcacactggccgatctcttccgttagttcggcatcccaccataaccccacacgttgatgactgaccaacatctggttaacggtttttaccgccgttcgaagatcggacatgcgggcgttaagctggaaagctaaggtgtccaacgcggacatctcattgacatccgttgccgtggtaatcaccggatcggcgcctaacattcctgccaggtagcgcgtcaaggcattggccccgcccgcatgaccggaaagcaggctaatgacatgctgacctcgttcatcaatgacgaccaccgccggatcgctgaacttgtcgttcactaacggcgccaggacacgaacggcaatgccggtcgcgccgataaaaataagcgcggtataagtggtaaaagcctgccgggcggtattagcgaatccgccatcgaagggaataaatccctcttcccgcagtttttcactggtaaagcaggttaacggcagcatcgcggcgagtctctttgccagcgccacgccgccgggcgtcaggcaaaacaacgcaatggattcaggctttacggtattcatggctaaagtccgctgcataaagtcttgagtagtgatactccttacccagaaaattcccgaccaggattagcgccgtcttacggatgccagcatcacgtactttgtcgctaatatccgctaacgtgccgcgaacggtctgactttccggccaggtagccttataaatgaccgcgacaggcgtagttgccggataaccgccggcaatgagacgttccgccacccggtgaatacgctgaacggagagataaatcgccatcgacgtctggtgactggcgaacgcctccagttgttcgcgcgccggtactggcgtacgcccttccagacgggtaataatgagactctgcgatacctccggtacggtatattccacacccagctccgccgcagcgccgagaaacgcgctgacgccaggcactacctgccagtcgataccacggcgagttaactcctcgccttgctcacgtacggagccgtacagcgagacatcgcccgtttgcaaacgcaccaccgtttttcccgccttcacgcccgccgccatcagctcgataatctgctcaagatgcagttcggcgctgtcgtagcgttctgcctgcgcggggcagtaatccagcagttcggtattgatcagcgaaccggcatagataactacctgcgcctgttgcagcaggcggtagcctttaagcgtgatcagctcgcgatcgcccggcccggcgccgacgaaccatacacagcgtggatcaaatgtctctgacatggttttcttccttctgacaggcgataacaaaaacaggattgttcggtttgaaatagtgccccgcccccagcggcgttaacgatgaaagctgaagctgtacacagtccattcgacatgcgccgatgtgcgcaagatgcgccagcgcgctatgaaggttttcctgcaagataaaggtcatcaccagacggccaccgggatgcagatggcccatcgcccagtcaatcagcgccgtcagatgtccgccgctgccgcccataaacaccgcatcggctttcccggttatggtcattggcgcttcgccggggagaatatcgatattgccgcaggcaaagcgctgacgattctcatcaagcagccgtagtgcggcaggattacgctcgatagccgtcacctgcaacgaaggaaattgcagcgccgcttcaattgagacgcttcccgttcccgccccgacgtcaatcaggtgactggcgcggtggagctcaagtttcgacagtgccagcgcccgtaccgcctctttggtcattggcacgttctcgccgcgcagaaaaagctcatctttcatcaaggatcaccactgcattcatttcatagtcggcgttgaccgcactgacgggtagccagtggatccgctcattttccatcgccagattttcaccaatcaccattaagcgatgccctttgccccgcgcgaccagttcccgcgcgatttctcgcggcccgcagcgggcatccgtgaccatcgccactttgcgatggttcgctaactgctcgaagctgacgcaacgaccgtggctactggtcaaccacatgtcattcatatcaattccagcctgtgcgcacagatactgtacggcgctgatgccagggataatgcgaacctgttcgataccaaaatgcgccaccaggcgtgtaccgatgccataaaacagcggatcgccggaggccagcaccacgatccctttatcccgacgggcggcaatccatgacaacaacgcgccaatatccgcgcccagcgtaaatcgttcgccgccaaacgccggaaactgcgccaaatgccgtttaccgcctgccagcgcatcggcgtggtctatcgcttccagcgccgcaggcgtcatcaaatgccgtccagcgggccccattcccacgaccgttagcattgcagctccttagcaatctcgtcgacgggacgattactgccgagaatatggttatcaaaagaaaacaggatggcgtcgcagacaggcggcgttttggtaaaacgcagcatctgcatgactcgcaaacaaatacgcctggcaagatggttatagatatgcccgaagccatatgcttcaatgtgctccattgccgcttcggtggtatcgcaatcgctgaccagggtgagtaactccagcggcgcgcccagtaaagctaaatgcgcgaccagcgtttccatgcgcgcatcggcaatatggctatgggtatgaaagatcccggcggcgattttgatcaattttccaggatgacccaccagcactatctggcaaaatcccagccgtaccgcctcttcaatcatgtagccgacaaaattgctcatggtgacgactgcctgtgtgtcgacgcccatttgttcgcgaacaaaccgttcggcgtggttgcccggcacgagtatcacccgcgttaatcctgacgcccgtttgatctccagttccagcgatagcgagcgtttccagctttcttccgacatcggcgtcacaatgccggtagtgccaataatggaaatgccgccaagaatgccaagccgcgagttatacgttttttgcgcccgcgcttcgccttccggggcaaaaatctccacatcggccccacgcgccgggcctatcgcttcgcgcaccgctgactcaatggtatggcgcggcgtacgattgatggcggcgctcccgagcggcagtccaatccctttacgcgttaccgtaccaataccttcgccgccagtgagcgtaatctcaccgctgtcgttgagcgtaacgcgggcaaaaatcagcattccgtgcgtggcatccacgtcatcgccgccatctttacgaattgcggctatcgcctgctggccttcaatgtgcggcgactccacgttcaggcatagcgtgacgcccgacggcgtgacgatggagacctgatgaatcagatgttgacgtaataccatcagcgcggcgacttttgccgccgccgtcgcgcaggaaccggtggtatatcctttacgtaacgctttaccgtggtgccagaccggcgcgtcaaaagaaagctcgctcatcaggcctcccggaggtgatagagcaacgcattgacgatagcggcagccacgttactgccgcctttacgccctaacgcggcaaccgcggggaaatggctatgggtgagtgcctctttggactccgccgcgccgacaaagcctaccggtacgcccaccacgccgctcaccgtcacgttatgttcaagcaaacggaacagggccgtcggcgcattaccgaaaacaaagagcttgtttttctcctcctcggcgatagcgatatcgacggcggccattgaacgggtaatcccctgcgtttgtgcggcgcgcaccacgcgcggatcgctgatataacagcgacactcgccgccaaacgtcgccagtaatcttttattaatgccggacagcgccatcgtggtatcggtataaataatgcacggatggcgtaacgcatcacaaagctgctccagcgcatcggcagagaaccacaaaatgtccagccagtcgaaatcggcggtggtatgaataacccgcttgataatggcctcatggagcggactggcgaaacggtaatcaggacgcgtttcgcgaataatgtcgctaataatggtgaaactgttggcctcaatggtttggggctgctggatataatgcatactgtcgtcctcaggccacgccagataacccgcaccgcgccgcaattaacagcgccagcgccagggttgaagcgacccacatcaatcgaatcgttcgggaaatatcgtccacggaaatatcgcgctgcgcgtcgcctatccagggcttgtccacacgctcgccaaagtagttatttgggccaccgagctggattcctaaggcgccggccacacacgcttccgaccaggcgcaatttgggctactgtggttataacggtcacgccagccaatacgcagcgcccgccaaccactcaggcgacacagtcctgccgcaatgcccagcaacagccagctcagtcgggcaggaagatagttcgctacgtcgtccatacgggcgctgaccataccaatcgcccggtatttttcatgtttgtagcccaccattgaatccagggtattgacggctttgtaggccatcgccagcggcgcgccgccgagaaagaggaaaaagagcggcgcgataatgccgtcaacggtgttttctgcaaccgtttccaccacggcgcgattgatctgcgctggctgaagttgcgacgtatcgcgcccgacgatccaggagagttttattcggctttccgcaaggtcgttcttccgtaacggtcgttcaacctcctgcgcggcgtgggccagagagcgtccggccagcgtggtaaagatcatccagacttcgacgctccagccaaaccaggggtgaatccgctgcgccagcgccagtacgccccatgccacgccccaggtcgccccgacaaccacaacccacattacgccgccgccaatccgcagcgctttatcgccgggacaatagcgacgcacaatacgctgcacaaacgtgattaaacgacctatccagcgtaccggatggggccagtgttgagggtcgccgatgataaaatccagcacccaggcgatacaccaggcaagaatcgtcataatacgcgcctcgccgccgccagccagtgctgcaacatttccggacgctgggcgaaatggacgtgcagatagctggcaaacgtgttgcctgtctgccagccgccagtccattcctgtaacacgcggccatcgcgaaccttacgacaggccataacggcgggtgtttcggggataaaatctgagtagtgaaattcatggccgcgcactatctcgccaggcgccgccaatagcgttggctgcatagcctgcgcctcacaataaccaaagcgggtgagtcgcttacccattttgctgtgaccggggataatattcgccatctgatgaatttccccgccgctatcctccagagtgctccccagatacatcagaccaccacactccgcgtaaatcgccacgccgcgctgatgcgccgcccgcaaatgttttaacatcaccgtatttgccgccagatccgcggcgtataattcaggatatccaccgcccagccagatcatctgacaatcaggcaatgcgcggtcatgcagtgggctaaaacgcacaatgttaacgccggcacgctccagcaaatcgatgttatcgggataataaaagttaaaggcctcatcatccgccagagcaagcgtcagccctgcccccgctgtgttatcggggcgttcaggccacattcccgccggaagcgcggataacacgctcagcgagagtagcgcatccacatccactgtttgttccagcgtggcggcaaaatcatgccatgattgctgattgacgagggattctctggcagtaatcaaccccaggtggcgttcaggtaatgcgacgccgtcgcaaggagggacataccccagtaccggcagtgagcaataatgttcaatggcatttttgaggagctgatagtgggcgtcgctagtgacgcgattcacaatcacgcccgcgaggttgagggtcgggtcgaagtgctgaaatcccataacggtagccgcaagcgacgttgaaacagccttgccgtccaccagtaggatgaccgggcaaccaagctgtttggccatcgcggctgtgctgcagtaattggggtcgacgccatagccgtcatacaaccccatgaccccttcaatgacagcgatatccgcctgccgcatttgttcgcaaaataaggcgttgagaacaggaggaggaagcatgaaactgtcaagattacgggacgccacgccacagatagcggtatgccagccggtatcaaggtaatctggcccaactttaaacggctgtacgcgcagcgcgcgtttttgcagcagcctcaacaaaccaagcgtcaccgtggttttgccgcaaccgcttcctgtgcctgcaagaataaatgcgtgatgccttgccgccattaccctgatcctgttcagggtggtaggggtatacaggtacgcgcatgttcagtctttcgactgtacgcgtcttcgcaacccacttcccaccgaagttgttggttatcaccgacaggcaggtcttctggcttagcgtcctcctcgcccgtccttcccaatcttgcgatcagtggtctttacggggtcgtcagcatcacagcagcgggggctgcgggggattttcacccccttccctaccacaaatgtggcaaacctgttggtttacgttatggctgtacggcacacccataacgacaattaataatgtgctacgttttacatttctgtgagcaatagcctgagcggttgctcatctgacgttaatctactcatccttaccggtatattgacgataaaacgtatcgacaaagcgtaataaaacttatctttcctgacactgtacttcatcacaaaaataaaaactggtgcagtttatgccctaaattttattattttgttgcgctatgacaatttattgttacaccagataaattttctttctgaaatgattaagatacaaaagactatcaaaaatcggcaatagcaaaatattgctattcataacgatggaggatgagaattctcatttatctgctggcgataagcctgcggcgtaacctgataggtctggcggaagactttgcaaaaatagctggtttgcgaaaagcctaaattacgcgcaatactggcaatactccagtcactatggcaaagcaattctctggcgctaaccattctctggcggtttacccacgcattaaatccgattccctgatatttcttgaatagcttactgaagtaataggggctgagatagacatgtgaggcgacatcctcaagacgaagatcgtcggacaaatgcgcatcaatatagcgaagcgcttttttcattttactgtcatgcggagtgggaccacgagtggttttatttgcctccgattgctgcggattgtctttgataaccacgaaattgagctgttttttcaggcaattctcaacaatcagtttaagaagatcggcggaagcgataacgcgtgaatagtccatctctggcacattccgaaattcattcaagagctcagggtcagcctgccagcgatcgtcaacattaagaatgtttaccagctccacgtcattacttaaacgaacctgcccgcataaaacaaagccaactaaatgccctgcgattaccagcggaatagaaaaatccgttagaccggcatgacaacgataaatacagggttgatcggacttcgatgcctccagtcccccgcagcgatcgctcatacgacaacgtgtactatgctggggatgctgccgcatcaactgacaaaacggcgtgaaattgaatagctcagatatttcatcaccatgaatattgacaaccacaaccgccagaccggtggcttgtgcaaaatcctgtgcgattttattaatgagttctgagttcagagcgctcgcagaaatcatgataaaacccctcagttaatttattgttataaacaaaacacattatttacattcactttttattaccattatcctggccctgataaaaagtacaatgacaatatcaaaagtctcccattgctgggagacgttttgatcagttcgtgaaagcagatcacgaaattatctcacctgtttttacgatacatcattgctgtgaatctggttcgcatttccttacagttcacagcggttacaaggtaaattcttaccaataaaatagcgatatatggctgctccggcacaggcgccgataacaggcgcgacaatcggcacgataaaataagggatctctcgcccaccgctcatcgccatgttcccccaccccgctaaccatgtgaacagtttgggaccgaaatcacgcgccgggttcattgcaaaaccggtaaggggtccagtagacgcgccgataacggcaaccagtatcccaataagcaaaggcgcaagcggccctttaggaatgccattgccatcatccgtcaatgccatgatcatgcccatcagaatcgacgtaatgaccacttccaccaacgcagcctgccatacatttagcgctgcggccggataggtactgaaaatgctggctaattgcaaactttcgacgctaccgcgcaccatatgatgcgcagtctcaaattcagtaaaaaggctactataaagcacatacgccagcagagcgccgccaaaagcgccggcaaactgggcaataatataaggcaatactttctgtttggggaagcaggcaaacagccacagcgcaatcgtcaccgcagggttaagatgtccgccggagattccggcagtaaggtaaacggccagtgaaattccaagcccccaaataatgcaaatctcccataatccgaggctggcgcctgcgactttgagcgcgctcaaacaaccgataccaaaaaacaaaaagagtccggtgcctaaaaattccgcaccacattgcgcctttagagaatcattcatgtgacaccttctgagcaaagttcgtgtcctggccagcgcaagtttcggctggcggtagagtacagctaacctcactataaaaagtgccgcctgtaaattgttggcaacctgcgaacctgtctcccggaaaaatcgtgttgcgatagcaaatttttgcttttccgatatttttagcagcccatcatacgggagattcgagctataaaatacgcctgtgaaaataataaaatattgcacaagccaacttatcaatttcgaataagcatcacattttgcgtctttcgccatatcaaataaaaatactctcgtcactaacaaaaatgtaaaaatgaaataaataaaaacaaaataatcatatagacaataataaattaaatgtaatttatcaataagttataaaagcaaaagacaatttagtcatattgctttcccattattttctgatgctcaacagcaagtcagccattctttttcctcgcatcttcttatagtcccaactatcggaacactccatgcgaggtctttatgcaacaagaagcactaggaatggtagaaaccaaaggcttaaccgcagccatagaggccgctgatgcaatggttaagtcagccaatgtgatgttagtgggctatgaaaagattggctccgggctggtaaccgtcatcgtgcgcggcgatgttggcgcggtcaaagcggccaccgatgcaggtgccgcagccgcacgcaacgtgggtgaagtgaaagccgtacacgtcatcccacgccctcacaccgatgtagaaaaaatcttaccgaagggaattagccaatgagcagcaatgagctggtggaacagatcatggcgcaggtgattgcccgtgtggcaacgccggaacaacaggccatccctggtcaaccccaacctatacgagagacggctatggcagaaaaaagctgcagtttaacggaatttgtcgggaccgccattggcgataccctgggcctggttatcgccaacgtcgataccgccctgctggacgcgatgaaacttgagaagcgctatcgttccatcggcattctcggcgcccgcaccggcgcaggcccgcacattatggcggcggacgaagcggtgaaagccaccaacaccgaagtggtcagcattgagctgccgcgcgataccaaaggcggcgcgggccacggttcgctgattattttaggcggtaacgacgtttccgacgtcaagcgcggtatcgaagtcgcgctgaaagagctggaccgcaccttcggtgatgtttacggcaacgaagccggacatatcgagctgcagtacaccgctcgcgccagctatgcgctggaaaaagcgttcggcgcgccgattggccgcgcctgcggcattatcgtcggcgctccggcttccgtcggcgtactgatggccgataccgcgctgaagtcagccaacgttgaagtcgtggcgtacagctctccggcgcacggcaccagctttagtaacgaagctattctggtgatttccggcgactccggcgcggtccgtcaggcggtgacctccgcccgcgaaatcggcaaaaccgtccttgcgaccctcggttctgaaccgaaaaacgatcgtccgtcctacatctgatacccacgaggctgattcatgagatcgaaaagatttgaagcactggcgaaacgccctgtgaatcaggacggctttgttaaggagtggatcgaagaaggctttatcgcgatggaaagcccgaacgacccaaaaccgtcgataaaaatcgttaacggcgcggtaaccgagctggacggaaaaccggttagcgaattcgacctgatcgaccactttatcgcccgctacggcatcaacctgaaccgcgccgaagaagtgatggcgatggattcggtcaagctggctaacatgctgtgcgatccgaacgtcaagcgcagcgaaatcgttccgctaaccaccgcgatgaccccagcgaaaattgtcgaagtggtttcgcatatgaacgtggttgagatgatgatggcgatgcagaaaatgcgcgcccgccgtactccatctcaacaggcgcacgtcaccaacgttaaagacaacccggtgcaaattgccgccgatgccgccgaaggcgcatggcgcgggtttgacgaacaagagacgacggttgcggtagcgcgctatgcgccgttcaacgccatcgcgctgctggttggttctcaggtaggtcgtccgggggtactgactcaatgctcgctggaagaagccaccgagctgaagctcggcatgctgggccacacctgctacgccgaaaccatctccgtttacggcaccgagccggtcttcaccgacggtgacgataccccatggtcgaagggcttcttagcctcttcctacgcctctcgcggcctgaaaatgcgcttcacctccggctccggctccgaagtgcagatgggctacgccgaaggcaaatccatgctgtatctggaagcgcgctgcatctatatcaccaaagccgcgggcgttcaggggctgcaaaacggctccgtaagctgcatcggcgtaccgtctgccgtgccgtcaggcattcgtgccgtgctggcggaaaacctgatctgctcttcgctggatctggaatgcgcctccagtaacgaccagaccttcacccactccgatatgcgtcgtaccgctcgcctgctgatgcagttcctgccgggtaccgactttatctcctccggttattccgcggtgccgaactacgacaacatgttcgccggttccaacgaagatgcggaagactttgacgactacaacgttatccagcgtgacctgaaagtggacggcggtctgcgcccggttcgcgaagaggacgttatcgccatccgtaacaaagccgcccgcgcgctgcaggccgtgtttgccggaatgggactgccgccgattaccgatgaagaagttgaagccgcgacctatgcccacggttcgaaagatatgccggagcgcaacatcgtcgaagacatcaagttcgcccaggaaatcatcaataaaaaccgcaacggtctggaagttgtgaaagcgctggctcagggcgggtttaccgacgtggcccaggacatgctcaacatccagaaagccaagctaaccggcgactatttgcacacctccgccattatcgtcggcgacggacaagtgctctctgcggttaatgacgtcaatgactatgccggtccggcaacaggttatcgcctgcagggagaacgctgggaagagattaaaaacatccctggcgctcttgatcccaacgagattgattaaggggtgagaaatggaaattaatgaaaaattgctgcgccagataattgaagacgtactccgcgatatgaagggcagcgataaacccgtctcgtttaatgcgcctgcggcatccacagcaccacagaccgctgcgcctgcgggcgacggctttctgaccgaagtgggcgaagcgcgccagggcactcagcaggacgaagtcattatcgccgtcggcccggcatttggcctggcgcaaaccgtcaatatcgtcggcttaccgcataagagcattctgcgcgaagtcattgccggtattgaagaagaaggcatcaaggcgcgcgtgattcgctgctttaaatcttccgacgtggcgttcgtcgccgttgaaggtaaccgcctgagcggatccggcatctccatcggcatccagtcgaaaggtactacggttatccaccagcaggggctaccgccgctctccaacctggagctgttcccgcaggcaccgctgctgacgctggaaacctaccgtcagattggtaaaaacgccgcccgctatgcgaaacgagaatcaccgcagccggtccctacgctcaatgaccagatggcacgcccgaagtaccaggcaaagtcggccattttgcatattaaagagaccaagtacgtcgtgacgggcaaaaacccgcaggaactgcgcgtggcgctttgataaaggataactccatgaataccgacgcaattgaatcgatggtccgggacgtattgagccgcatgaacagcctgcagggcgatgcgccagcagcggctcctgcggcaggcggcacgtcccgcagcgcaaaggtcagcgactacccgctggcgaacaaacacccggaatgggtgaaaaccgccaccaataaaacgctggacgactttacgctggaaaacgtgctgagcaataaagtcaccgctcaggatatgcgtattaccccggaaaccctgcgcttacaggcctctatcgccaaagatgcgggtcgcgaccggctggcgatgaacttcgaacgcgccgccgaactgaccgcggtaccggacgatcgcattcttgaaatctacaacgcccttcgtccgtatcgttcaacgaaagaagagctgctcgctatcgccgacgatctcgaaaaccgttatcaggcaaagatttgcgcagctttcgttcgtgaagcggcagggctgtacgttgagcgtaaaaaactcaaaggcgacgattaaggatttcgtatgcgatatatagctggcattgacatcggtaactcatcaacggaagtcgcactggcgcggcaagatgagactggcgcactgacgattacacacagcgcgctggcggaaaccaccgggatcaaaggcacgttgcgtaacgtgttcggcattcaggaagcgctcgccctcgtcgcaaagcgcgcggggatcaatgtcagagatatttcgctcatccgcattaacgaagccacgccggtgattggcgatgtggcgatggaaaccattaccgaaaccatcatcaccgaatcgacaatgatcggccataacccaaaaacgccgggcggagcaggccttggtgtgggtatcacgattacgccggaggagctgttaacccgcccggcggactcgtcctatattctggtggtatcgtcagcctttgattttgctgatatcgccaatgttatcaacgcctcaatgcgcgccggataccagattaccggcgtcattttgcagcgcgacgatggcgtactggtcagcaaccggctggaaaaatcgctaccgattgtcgatgaagttctgtacatcgaccgcattccgctggggatgctggcggcgattgaagtcgccgtgccgggaaaggttatcgaaaccctctctaacccttacggcatcgccaccgtatttaatctcaacgccgatgagacaaaaaacatcgtcccgatggcgcgcgcgctgattggcaaccgttccgccgtggtggttaaaacgccatccggcgacgtcaaagcgcgcgcaatacccgccggtaacctggagctgcaggctcagggtcgtaccgtgcgcgtggatgttgccgccggtgccgaagccatcatgaaagcggtggacggttgcggcaagctcgacaacgtcaccggcgaggccgggaccaatatcggcggcatgctggagcacgtgcgccagaccatggccgaactgaccaacaagccgagcagtgagattttcattcaggatctactggccgttgacacctcggttccggtgagcgtcaccggcggtctggccggggagttctcgctggagcaggccgtcggcatcgcctcgatggtgaaatcagaccgtctgcagatggcgatgattgcccgtgaaattgagcagaagcttaatatcgacgtgcagatcggcggcgctgaggctgaagccgccattctgggcgcgctgaccacgccgggtaccacccgaccgctggcgatcctcgacctcggcgcgggctccaccgatgcctccatcatcaaccctaaaggcgaaatcatcgccacccatctcgccggggcaggcgacatggtcacgatgattattgcccgcgaactggggctggaagaccgctatctggcggaagagatcaaaaaatacccgctggctaaggtcgaaagcctgttccacttacgccacgaggacggcagcgtccagttcttcccgacgccgctgcctcccgccgtgttcgcccgcgtctgcgtggtgaaaccggacgaactggtgccgcttcccggcgacttagcgctggaaaaagtgcgcgccattcgccgcagcgctaaagaacgcgtctttgtcaccaacgccctgcgcgcgctgcgccaggtcagtccaaccggcaacattcgcgatattccgttcgtggtgctggtcggcggctcgtcgctggatttcgaagttccgcagctggtcaccgatgcgctggcgcactaccgcctggtcgccgggcgaggaaatattcgcggcagcgaaggcccaagaaacgcggtggccaccggcctgattctctcctggcataaggagtttgcgcatggacagtaatcacagcgccccggctatcgtcattaccgttatcaacgactgcgccagcctctggcacgaagtgctgctgggcattgaagaggaaggcatccctttcctgcttcagcatcacccggctggagatatcgttgacagcgcctggcaggcggcgcgcagctcgccgctgctggtcggcattgcctgcgatcgacactcgctggtcgtgcattacaagaatttacccgcatcggcgccgctttttacgctgatgcatcatcaggacagtcaggcccaacgcaacaccggtaataacgcggcacggctggtcaaagggatcccctttcgggatctccatgcttaatcacaggagaacggcagtatgaataacgcactgggactggttgaaacaaaagggctggtcggcgccattgaagccgccgatgcaatggttaaatccgccaacgtacagctggtgggctacgaaaaaattggttctggcctggtgaccgtcatggttcgcggcgatgtcggcgcggttaaagcagccgtagatgccggcagcgcagcggcaagcgtcgtgggtgaagtgaaatcctgccacgttatcccgcgtccgcacagcgatgttgaggccattttaccgaaatcagcctaatcgatggcgaataaggagcaccgcgtgaagcaatcactgggattacttgaagtttgtggtctggcactggctatcagctgcgccgatatcatggcgaaatccgcttctatcacgctgctcgccctcgaaaagaccaatggttcaggctggatggtgattaaaattaccggtgatgtggcctccgttcaggcggctatcaccaccggtgcgcatttcgccgaacagcggaatggcctggtggcccacaaggttatcgccaggcccggagaagggatcctgctcgcagagacaccctccccctccgtcattgaacctgagcctgaagcgtcagagatagctgatgtcgcttctgaagcgccagccgaagaggccccgcaggaatcagaactggtcagctgcaatctgtgtctggatccaaaatgtccgcgccagaagggcgaacctcgtacgctttgcattcattccggcaagcgaggtgaagcgtaatggataaagagcttctgcaatcaacggtccgtaaagttctcgacgagatgcgccagcggcctattccgctgggcgtctcaaaccgtcatatccacctgtccgcacaggattatgagcggctgtttcccggccatcccatcagcgagaaaaaagcgctgctgcagccgggacaatacgccgcggagcaaaccgtcactctggtgggaccgaaagggcagctcaaaaatgtgcgcctactcggcccgctgcgctcggtaagccaggtggaaatttcgcgtaccgatgcgagaacgctggggattgccgcgccgctgagaatgtccggcaacctgaaggggacgccgggcatccgcctggtcagcccctttgccgaactggagctgccttccggggttatcgtcgcgcagcggcatatccatatgtcgccgcttgatgcgctgatcctgcgggtttcccacggcgatatggtctccgtggcgattgaaggcgacgatcgcgggctgattttcaacaacgtggcgattcgcgtttcaccggacatgcgcctcgaaatgcacattgataccgatgaagccaacgccgctggtgccgataacccgcatgcctttgcccggctggtaggcccgcgatgaacggcgaaaccctgcagcgcattgtcgaggagattgtctcccggctgcatcgccgtgcccagagcacggcgacgctgagcgttacgcaacttcgcgatgccgactgtccagcactgttctgtcagcacgcgtcgctgcgcatcctgctcatcgacctgccgctgctgggtcagcttgcggatgcagaaaccggcgatgccgccgcccggaaaattcacgacgcgctggcgtttggcatccgcgtacagctcagcctgcacagccagctgctgccggttatcccggtaaaaaaactggctcgtctgccgctggtattcaccgatgagcacggactgccgctggttctgcatgcgggttcggtgctgagctatcgcgatgtcgcgctgctaagccgggggcgtgtggttgtccaccgcaaatgcatcgtgaccgccatggcgcgtgacgcggccaatgcgcggaatattcaattaattaagcaggagtaaatcatgcatctggcacgagtcacgggcgcggttgtctccacgcaaaaatcaccttctttgattgggaaaaagctgctgctggtgcgtcgggtcagcgccgatggcgaactccccgcctcgcccacctccggcgatgaagtggccgtggactccgtcggcgcgggcgtcggcgaactggttttgctcagcggcggctccagcgccaggcacgttttttccgggccaaatgaggccattgacctcgccgttgtcggcattgtagatacgctttcgtgttaaggggcggttatggcgatttatacccgaacaggtgacgctggcaccacatcactgtttaccggccagcgggtgagcaaaacccacccgcgggttgaagcctacggcacgctggatgagctgaacgccgcgctgagcctgtgcgcctgcgccgctgcggatgaaaaccaccgcaccttactcgaggccatccagcagcaacttttttggtttagcgcagagctggccagcgacagcgagcagccatcgcccaaacagcgctacatcagcagcgaagagatttcggccctggaagccgctatcgatcgggcgatggcccgcgtcgaaccgctgcacagctttattttacccggacgctgcgaagccgcgagccgcttacattttgcccgcacgctggcgcgccgcgccgaacgccgtctggttgaactggcaactgaagtcaacgtacgtcaggtgctgatgcgctatatcaaccgcttatcggactgcctgtacgccctggcccgcgcggaagatagcgatgcgcaccaggccaacatcatccgtgaagttagcaagcgctatctggctgcctgccagccgccccacagcaaggagacgacgccagtggccctctcattccacgatctgcaccagctcacccgcgccgccgttgaacgcgcgcagcaactgcaggttccggtagtcgtcagcatcgttgacgcgcacggcacggaaactgtgacctggcggatgccggacgccctgctggtcagcagcgagctggcgccgaaaaaggcctggaccgcagtggcgatgaaaacggcgacccatgagctgagcgatgtcgttcagccgggcgccgcgctttacggtctggaaagtcatttacagggaaaagtggtcacctttggcggcggttacgccctgtggcgcgacggcatattaattgggggtcttggcatcagcggcggcagcgttgagcaggacatggacatagcacagaccgccatcgcggctattaacgtgggaactcatcaatgaatacttctgaactcgaaaccctgattcgcaccattcttagcgagcaattaaccacgccggcgcaaacgccggtccagcctcagggcaaagggattttccagtccgtgagcgaggccatcgacgccgcgcaccaggcgttcttacgttatcagcagtgcccgctaaaaacccgcagcgccattatcagcgcgatgcgtcaggagctgacgccgctgctggcgcccctggcggaagagagcgccaatgaaacggggatgggcaacaaagaagataaatttctcaaaaacaaggctgcgctggacaacacgccgggcgtagaagatctcaccaccaccgcgctgaccggcgacggcggcatggtgctgtttgaatactcaccgtttggcgttatcggttcggtcgccccaagcaccaacccgacggaaaccatcatcaacaacagtatcagcatgctggcggcgggcaacagtatctactttagcccgcatccgggagcgaaaaaggtctctctgaagctgattagcctgattgaagagattgccttccgctgctgcggcatccgcaatctggtggtgaccgtggcggaacccaccttcgaagcgacccagcagatgatggcccacccgcgaatcgcagtactggccattaccggcggcccgggcattgtggcaatgggcatgaagagcggtaagaaggtgattggcgctggcgcgggtaacccgccctgcatcgttgatgaaacggcggacctggtgaaagcggcggaagatatcatcaacggcgcgtcattcgattacaacctgccctgcattgccgagaagagcctgatcgtagtggagagtgtcgccgaacgtctggtgcagcaaatgcaaaccttcggcgcgctgctgttaagccctgccgataccgacaaactccgcgccgtctgcctgcctgaaggccaggcgaataaaaaactggtcggcaagagcccatcggccatgctggaagccgccgggatcgctgtccctgcaaaagcgccgcgtctgctgattgcgctggttaacgctgacgatccgtgggtcaccagcgaacagttgatgccgatgctgccagtggtaaaagtcagcgatttcgatagcgcgctggcgctggccctgaaggttgaagaggggctgcatcataccgccattatgcactcgcagaacgtgtcacgcctgaacctcgcggcccgcacgctgcaaacctcgatattcgtcaaaaacggcccctcttatgccgggatcggcgtcggcggcgaaggctttaccaccttcactatcgccacaccaaccggtgaagggaccacgtcagcgcgtacttttgcccgttcccggcgctgcgtactgaccaacggcttttctattcgctaactgaggtcgcgatgaataccttctcactacaaacgcggttgtacagcggtcagggcagcctggcggtgctcaagcgctttaccaataagcacatctggataatctgcgatggctttctggcgcactctccgctgctggataccctgcgtaacgcgctgcccgcagataaccgcatcagcgtctttagcgagataacgccggaccccaccatccacacagtggttcagggcattgcgcaaatgcaggctctgcaaccgcaggtggtgatcggttttggcggcggctcggcaatggacgcggcgaaagcgattgtctggtttagccagcagagcgggatcaacatcgaaacctgcgtggcgatcccgaccaccagcggcaccggctcggaagtgaccagcgcctgcgtaattagcgacccggataaaggcatcaagtatccgctgttcaacaatgcgctgtatccggatatggcgatcctcgacccggagctggtggtcagcgtaccgccgcagattaccgccaacaccggcatggacgtgctgacccacgccctggaggcctgggtgtcaccgcgcgccagcgactttaccgacgcgctagcggaaaaagccgccaaactggtgttccagtatctgcccacggcggtggaaaaaggcgactgcgtggcgacgcgcgggaaaatgcacaatgcctcaacgctcgccgggatggccttcagccaggcggggctggggcttaaccacgcgatagcccaccagcttggcgggcagtttcatctgccgcatggcctggccaacgccctgctgttaaccacggttatccgttttaacgccggcgttccgcgcgccgccaaacgctacgcgcggctggccaaagcctgcggtttttgcccggcagaagccaatgatatcgcggcgatcaatgcgctgattcagcaaatcgaactgcttaagcaacgctgtgtccttccctcactggccgttgcgcttaaagaaggaagatccgacttttccgcacgcattccggcgatggtgcaggctgcgctggctgacgttacgctgcgcactaacccgcgcccggccaatgccgaagccattcgggaactgctggaggaactgctatgagcaccgccatcaacagcgttgaaatgtcccttagcgccgatgaaattcgcgagcgcgttcgcgcagcgggcgttgtcggcgcgggcggcgcaggttttcccgctcacgtcaaactacaggcgcaggtagagattttttctggtgaacgccgccgaatgtgaaccgatgctcaaagttgaccagcaactgatgtggcagcaagctgcgcgccttgtgcgcggcgtacagtacgccatgacggcaaccggcgcgcgcgaaggggtgatagccctgaaagaaaaataccgccgggccatcgacgccctcaccccactgctgccagacggtatccgcctgcatatcctgccggatgtatatccggcaggcgatgaggtgctgactatctggatggcaaccggtcgtcgggtcgccccggctgcgctaccggccagcgtcggcgtggtcgtcaataacgtgcaaacggtgctaaatattgcccgagcggtcgagcagcggtttccggtcactcgtcgcacgttgaccgtgaacggcgcggtcgccagaccgttgaccgttactgttcccatcggcatgtcgctgcgggaagtactggcgctggcgggcggcgcaacggtcgacgaccctggttttattaacggcggcccgatgatgggtggcctgattacctctcttgataatccggtgacgaaaactaccggcggcctgctggtgctccccaaaagccatccgcttatccagcggagaatgcaggacgagcgcacggtgctttccgtcgcgcgcaccgtctgcgaacagtgccgactgtgtaccgatctctgtccgcgacacctgatcggccacgaactctctccgcacctgctggtgcgggcggtgaactttcatcaggctgccacgccgcagctgctgctgagcgcccttacctgttcggaatgcaacgtttgcgaaagcgtggcctgtccggtggggatctcgccgatgcgcatcaaccgcatgttaaaacgcgagctacgggcgcaaaaccagcgctacgaagggccgctgaatccggccgacgagatggcgaaatatcgcctcgtgccggtgaagcggctgatcgccaaactgggactaagcccctggtaccaggaagcgccgctggttgaagaagaaccgtcagtagaaaaagtcactttgcagctgcgccagcatattggtgccagcgcggtagcgaacgttgcggtgggagaacgcgtgacgcgcgggcaatgcgttgctgatgtcccgcctggcgcgctcggcgcacccattcacgccagcatcgacggcgttgtatcggccatcagcgaacaggccatcactgttgtaagaggttaaccatgtctcaggctataggaattttagaactcaccagcatcgccaaaggcatggagcttggtgatgccatgctgaaaagcgccaacgtcgatctactggtcagcaagaccatctgtccggggaagtttttactgatgctgggcggcgatatcggcgctatccagcaggccattgaaaccggtacgtcgcaggccggcgagatgctcgtcgacagcctggtgctggcgaatattcatcccagcgtacttccggccatcagcggcctgaacagcgtcgataagcgccaggcggtaggtatcgtcgaaacctggagcgtggcggcctgcattagcgccgcagaccgggcggtgaaaggctcaaacgtcaccctggtgcgggtgcatatggccttcggtatcggcggtaaatgctacatggtggtggcgggcgacgtttctgacgtcaataacgccgtgacggttgccagcgaaagcgcgggcgagaaagggttgttggtttaccgttcggtgatcccacgcccgcatgaagccatgtggcgacagatggtggaggggtaatggaaagacaaccgacaacggatcgcatgattcaggaatacgtgccggggaaacaggtcactctcgcgcacctgattgctaatccagggaaagatctctttaagaagctgggcctgcaggatgcagtgtccgccattggcatccttaccatcacgccgagcgaagcatcgattatcgcctgcgatatcgccaccaaatccggcgcggtggaaattggttttctcgatcgctttaccggtgccgtggtgctgaccggcgacgtttctgccgtcgagtatgccctcaagcaggtaacgcgcacgctgggcgaaatgatgcagttcaccacttgctcgatcacccggacgtaaagtcatgaagcgtttgatgtttatcggccccagccagtgcggaaaaacctcgctgacccaaagcctgcgcggcgaagcgctccattataagaaaactcaggccattgaatggtcgccgatggccatcgatacgccgggcgaatatctggagaaccgctgcctgtacagcgccctgctgaccagcgcctgcgaggccgacgtcatcgccctggtgctgaatgccgacgcccagtggtcgcccttttctccgggttttaccgccccgatgaaccgcccgacgattggcctggtcaccaaggccgatctcgccgagccgcagcgtatttcgctggttgcggagtggcttacgcaggctggcgcacagcagatttttattaccagcgcgctgaataactcgggtctcgacgccgtgctggattttctgaattcgaaggaacctttatgtcttacaaaataatggccattaacgccggtagctcatcgttaaaatttcagctgctggagatgccgcagggcgacatgctctgtcaggggctgattgagcgtatcggtatggcagatgcgcaggtgacaattaagacgcacagccaaaaatggcaggaaaccgtccccgttgccgatcatcgcgatgcggtaacgctgcttctggaaaagctgctgggttatcaaatcattaacagtctgcgggacattgatggggtgggccatcgtgtggcgcacggcggtgagttttttaaagactcgacgctggtcacggatgaaacgttagcgcaaatcgaacgtcttgctgaactggccccgcttcacaacccggtaaacgcgttgggtattcacgtttttcgtcaactgttgcctgatgccccttccgtagccgtgtttgatacggcatttcaccagacgctggatgaacccgcctatatttacccgcttccctggcattattacgctgaactggggattcgccgttatggctttcatggcaccagccataagtatgtcagcggcgttctggcggaaaagctgggcgtaccactcagcgcattacgggtgatttgttgtcatcttggaaacggtagcagcatctgcgccatcaagaacgggcgttcggtcaatacgtcgatgggctttacgccgcagtcaggcgtgatgatgggcacccgtagcggagatattgatccctctattctgccgtggatagcccagcgcgaaagcaaaacgccgcaacagttgaatcagttattaaataatgagtcaggcttgctgggcgtttctggcgtgtcgtctgattaccgcgatgtcgaacaggcagccaataccggtaaccggcaggctaaactcgctctcactctgtttgccgaacgcattcgcgccaccattggcagctatattatgcaaatgggaggactggatgcgctggtattcactgggggcattggcgagaactcagcgcgcgccagatcggcggtgtgccataatttgcaatttttgggcttagccgttgatgaagagaaaaatcagcgtaatgcgacatttatccagacggagaacgccctggtgaaagtcgccgtcatcaacaccaacgaagagttaatgatcgcacaagacgttatgcgcattgcgctaccggccacggaagggctttgtgtaccagcctgagagggttatacgacgcattgcggcaagtcatggtaataacgcttttaccatgacactatgcgcgcacactattcgtacctgaaaggtgataatgtggctgttgcgcaatgccccgcctcatgcggggaacttatccagggatggattctgggcagtgagaaactggtctcctgccccgttgactggtacagcaccgtagcagtcacggctgcgccgccgttgataaacgagcgcccattgtcgcgggcgatggtggagcgcgttctggcgcactggcagtatcctgcgcactggagtaacgagattcgcgtcgatgtgcgttcgtcaattcccgttgccaaaggcatggccagcagcaccgcagatattgccgctacggcggtggcaacggcgcatcatcttggccattcgctggatgaaaccacccttgcacagctttgcgtctcaatcgaacccactgatagcaccgtttttcatcagttaacgctgtttgatcataataatgcggccacgcaaatcgcctgcgagccaccgccgccaatcgatttgctggtactggaaagcccggtcacactgcgcacgcaagattaccaccgtctccctcgccagcagaaattaatagcaagttcagcaaccttgcagcaggcctggaatctggtgcaggaagcctgtataacgcaaaatccgctccggctgggtgaggcggctacgcttagcgctatcgccagccagacgctgttacctaagccgggctttaccgccctgctgtcgctggtcgaagagtgtgatttatacggattgaacgtggcgcatagcggtagcgtggtgggtctgatgctggaccggaaacgtcatgatattgcgcgtctgaaaggtaagctggcagagaaaaaacttacccgacactggccaaaacaacatttactcaagatggtcactggcggggtcaaactgcagtgagagcctgatatacgctcccactgccgtagcgcattattcggcttttacatcggcgtgtttcatttcgcccatcgctttcagctttttggaaatgtcgcgacgctctttggagatttcggcatttttaatgatgtagtcatcaacgcgatcttcatagtcgcttttcatactggcgatgataccctgaatcgcctcaacgctcatacctggcttgatgtagtcgctcaggttgtccagcagcagcacacgcttctggttgtcacggatcttcttctcaatgtcctgaatttcacgctgcagtttatttttgcgacggaacagacgaacaaactccagcacgtcctggaaagaaggcttggttgtttccatttttacacccctgataatgtgagattcggattcgttaagcaactgctagtggataaacattacgtttatccccgtcatacttcaagccgccagaggaaacaccgttacgtcgccgtctggggaaacctgaaggttcggggataaaatcgttgccagtagcactcattttatccttatattagtatcatactcttaatctttgctgaatcgaagcagcaacaaattcattcgccccatctgctttttatttgcgcaaagcccggcagatcaaatgtgaaagcagttccaactgtcgggcagtttccatacttagccaaacatagccgtggataggggtttcagccaccgcgtcgccctgctgctcgttcattagctgccgcaactcggcagcaatatcattcagtttaccggtgtttgccagtaccggctgcgggttgccttcaaacaacgcgtgggcgatcgttagcaaggtttgctgcgtcatctgctgggtttcacgcaatgtgtgcgcgttaagcatcacaaaatggctggcgcgcgtcgcccagtgggcattgatttgtaattcaagcatacaaaccaggttgcggttgatggtctgaatggcctcgaaaatagatttttgtatccgggtttctttactggcaggcgttatcagcccgcgcattttgacgacatcgttcagcaaccgttgcaaatgtttatccaaccgggggcgctccagcaaattcggcgacagcgctgcctgatacacccgattatacgccgtgacgcaatgcgccagttggatgcgccagtgcaaaaaggcgcgctggggccagatgccggtaaacaacattgccagtagcgaccccaaaatcacatccccgccacgccataatgccgtatccatatcaccagcgggagcgccgacaacaacggcaagcgttatgcctatcagtagcgcctgatacggttttttccctaaggccagccagccgcacaaaaacatcgctatcgcacaccacaccagcatcagcggtaaggaaaagagctccaggcgtagcgccaccagccctaacgccgcgcccagaatcgtaccgcctatgcgctcaaaagcacgaggcactacatttccccagaatgagatgggccccataatcaccactaacgtgattagcggccatgtgccctcgggaatagaaaacagacgaaccagcagaaaggtaagaatgaacgccagggcgatacgtatgccatgcacgatgcgataatgacggtacaaccgtatttcaaaagggcttaatgacttatcggcacgcacgcttgcgctccttacgggaatggcaaaaaatgcattgtacctgctttatagcaaaaatagcgcactggcggacggaacacattatccgtccgctcttttcagccaggaaaccagtcgatcacttccgctgtaccggaatatacatttcaatatcccagtatccatcttccatgccgttattcagataggtttcaaaacagggcgcagaggctatctgataagcgctatcctgctcgaggacatcaaaaaaccgttcccacggcttcgcaaagtcacggtcttccactcgcgcgacagcagtggcatattcgccgccttcaatggcggtcacgattacgccttcgctattgtccggcaggatgaaattctctgccacggacaccacggtatcgcagcggagtttttctgcaggtacgacatctggattgtcgtaatagacggcaatccattcaactggcacgatccgctgtcgatccacccacgtcatcagttgttcaaaaccctgcttcacggtgtgttcccatggaccgaccatgtggaaaccggctatcttgcgtttttgttcctgcctgatttcgtaatccatgctgcctccgtcacttcacaatgctgtatgaatgtacagtataattacagccttttacggtcacaaggacagcgtgatcattttgtgagcaacctcgcaatcccgcccttttgacacctcagatgacggtgaacggtgtgtgtgacaacggcttacgctttatgctgaaaatagtcgctcagacgagagaacataccgcctttacccaccgattccagagtgaccagcggccactgagcgatcagtttatcccgatcgtagagctctatttcacctacctgttgatgagcggcgattggcgcctccagctcttttctatccagcacatattttgctttgatatgcggaatttccgctttaggcagcgccatccagaagtcctgttccgtacccagcgcaatcttttctttgtctccataccagattcgctcgctgcccacttttttaccgctgtgcaaaatctgcaccgtcgcaaagttttgctggccccactgcaacagttttcgcgcctgttcctcacgacctttcgaacttttcgcccccatcacaacggcgataagtcgacgctgcccgtccaccgccgatgcgataagattaaatcccgcccccgatgtgtgtccggttttaagcccatcgatatgcatggtcttatcccataacaagccgttacggttctgctgcgtgatgccgttccaggtcaggcttttctcgctgtacatgtgataaaattcaggctcgccgtgaataatcgcccgggagagtacggccaggtcatacgcggagctatgttgtcccggcgcatccagaccgtggacggtttcaaaatgggtatcctgtaaattgagttttttcacatagctgttcatcatcgccacaaactgcggctgcccgcccgcgatataatccgccagcgccacacaggcatcgttaccggaatccacgattaagccacggcttaaatcacgcaccgacacgcgatccccttcttttaaaaacatcaacgaggagccgacaaacaccggattatccttcgcccaggcgtcgcgcccaactgtgacgatatcgtcagggctgatacgatgactatcgatggcgcgatcgacgacgtagcccgtcattagcttggtaaggctggcgggattacgttgctggtgttcattaccggcggtaagaacctgtcccgtagtgtaatccatcaacacccaggcgcctgcatcaatggctggcggttggggagcaaaacttacggcatcggccgcaagcgcaggagaaaggtgcatcgcgaataaagaagcggcaataaacaaacggcgtttcaacagcatgtcctcaggatggtctctatttgccgttctttttacggaagttcagttaaacaaacatggataaattgcaagaaaatgtgacacaaggcacattttcttgctgacattattttatggatacgctcagacggcggacttatccccgcgcggcgcggtacgatgacgatgatagccgtcaaccatgctacggaaaatttgtcccggcgtgtcgccaagagtacacagatagagatgcgcgcaaataaacagtaagccgatgatagcaagcgccatatgcagcaccagcatcacagggcccagacccgcaacctgcggatagagacacagcaaaccggtgatgattaacagcggtaccagcgcgtacataatcgccagatatgccagttgttgcagtggattgaacttattctgctctgttgccacgaacggatgcgcttcccctttcataatgccaaaaaggtaaaaacgcgtctggcgtatgcagcgcgttaccagtccggaaaaatttacccgatagtgacgcccgttacctgtggtgaggttgatcagcacaaacccgccccagaaagccagtaaggcaaaaccacaccaggtatgcacttgtaccattagcgctacagggccgagagaaaaatgaccaaataaaccgcttaacagtaataaaacaaacagtaacgcatttccccaatgccagcggcgaatcgccagcgagtagagatagtcacgatgttcttcaccgcccgccgtttttggcgccagcatccggcgcaataacgcatggataaccagcccaacaagcatgagcagcaccacgacgcctgcgtaaattaaccacagcggccaataatctggcgcataatgtagttccgctccccagatagtattcatgctttaccctcctgatggacttctttacgacggtacagactgaccgcgccgctacgcgcctcctgctggcgatagacctctttctgaccgacccagcgctggatctcgctctcatccagtctgccgaatttcagcgcgtccgttgggcaaacggatacgcacgccggagactggccagccgccaaccgcgtgtcggcgcagaagttacacttgtcggcgacaccggtttgcggattcaaatagcgcacatggaaaggacacgcggcaacacaataatcgcagccaatacagcgcgatttatccacctgcacgatcccgttttcatcacgatatgacgctccggtaggacaaacgctgacacatggcgcattttcacagtgctgacaggagacgcggacaaattgaaaatgggttagtgcgttggatgcctgttcaggggcgcgaatttgtacctgtacgcggctaaatccctccggtacgtcattaagcactttgcaggcaacggtacacgcctggcagccgatacaacgtttttcatcatgcagcatgacgtactgattcgttaaatgattcatggttccctcctccctcatgcccggctcagcgtcacgcctgcggtatgcactaccgtaccggataccggactcgtcacgtgcggcagtaaatttccgcagtggataccgtgtgtcgtcgccgccgttttggccccagctttagcgccaaatcccatatagacaaaaagcgtgtccgggcggataccgggcgtcaccagcgccttacctttctctttacccgtggcattttccagccagatctcatcgccggtcttaatgcctttttcttgcgccgtttgcggatgaacccagaccgcgttatcccacattagctcgctgagtaaaggtacgtactgcgtcgcgccattggtatgcacggccaccttgccctgaatgaagtaaagctcattctcttttttcagcgcaaagtcacgaacgcgcggaacgccgtagccagggagcaattcctccagggttgcggaataaagttcgattttgccggagggcgatttgaagcgaagctgttcgccataggtgttgtcactgtccgtcgcgatagcgccggggtaacgcgccgtaaactgacgaacggattctggttcgcgtaatagcagcggaacgccccattcgagataccctttctgtcgcagttccttcgctaaggcatggtcgccgttcaactgatagagttggcgcgtctgcatatcctgccacggatagtactgccctaatcccaactgctcgccaagttctttccagatttgccaactcggacgcgcctcgccaatcggctctacgacctgttggcgcagagcgtaagccgggtgcagtcccgacatatcggatacctcttcgtcccgttcgagataggtgcattccggcagcagatagtcggcatatgccgcgctctcgctcaaatagacatcgcagctgaccaccagatccagttgctcaacggtttttaccaggtccgaacgacaggtgacggtctggaaaggattatgccgcgacataatccacgcctttatcgggtaaggcttctgggttaacgccgagtcaataatgctttgcaccacgccgccgccagcggcgatatatttaaactgcggtgcgaccaaatcgatgcgttgcgccgtcggtttcggcatatttttaatgttgagtttcgccagcgttggcgcgaccttttctccggccagtttattgtaaacagacgcgttttttttctgatatagcccgccttcgcgctcaatattaccgagcagcacattaagcgtaaaaatcatacgccgcatatcgatctcttcctgcgagaacgtcgcgcgatgaccaggactgacaatagcgtgaggcgcgcaggcagccagttcgcgtgtcacccggacaataacgtcggctgggacatcggcctgcgcggcggcccattccggcgtcgtctcttttaccgcctgtgctaactgttcaaatccgctggtataacgctcaacaaaagacgcatcgtagagctgttcatcaatcatgacgtggcacatcgccagcagaaccgctaaatcccccccgggacgaatagcgtgccactcatccgccttgctggaaaatatcgacaaacgcggatcgaagctcaccattttggcccccttctcctgcgcggtcattaactcatgggtatcggcaacttcaatcccttcatacaaattgtggccaaacgaaaccagatagcgcgtgttagcgatatccatcgccagatcgccgcccatcatcacttttgccgcaatggctttcccggcagggcatgttgaggcgtgcgtaaaggtattaggcgaaccaaaggccgtagccagatggaaaagatggctggagagcgagcccgatttggaagagaaagccacgctctcggggccatgctgcgctttgatggcattcattttcgccgcgatttcctggtaagcctgttgccagctaatcacctgccattcaccgtcgccgcgtggcccggtgcgtttcataggttttacaatccgttgcgggtcattgaccaggctgacgccgctcccgcccctggcgcatatgcgcgtcccctgctgcggcgcagaaggattgccctggataaaaacggtcttgttattgactacctgcgcctgaatagggcaacgaaaggaacacatttcgcacaagcttggcgttagcgtggttttaccgttaatgccggcaatcgggttgcgcgccagcgccccgggcggaaaagcgcccagcgcgcaggcagagcagccgatgcctaccccctgcaaaaaagaacgacgactaatgctcatataacctcctgttattagatatagctgaagattatatttaatttgtattatgaaatgtcggcttcaatcacaatttgaaatagttgttaaaatgagcatgtcaacacgataaaaccttttattttataaatattttacatttcctgaacacgcacatggactgtcattgaataatcagcagaattaccaaacaacccgctgttaattataaaaatgatacaattccaataacacgtaataatatttaaaagaaaacgattatttcctgaaaagcgatttcacgcgctttacgcagttctttctcatacgcgccggaacgtccgccgacgatatcccgaatgccggcgaaaaacgctggttgagcatcgaagcgggtttacttttgcgtgcacacgggcttcgttacccgacccgctcccttatgccttgatttttccgcagatacgtcagcgtcccacaatacggtgacatgatgacaggatggacactttctgaaagaaacctgccagataacatggtgaattgtgatctccatcgccataccgacatatgaagcttacttttaaggcgttaaaaatccagaccgtttttccataatgatgttgataaggaattctaatgaagatatcatcaggcgcaattaatttttctactattcctaaccaggttaaaaaattaattacctctattcgtgaacatacgaaaaacgggctcacctcaaaaataaccagtgttaaaaacacgcatacatctttaaatgaaaaatttaaaacaggaaaggactcaccgattgagttcgcgttaccacaaaaaataaaagacttctttcagccgaaagataaaaacaccttaaacaaaacattgattactgttaaaaatattaaagatacaaataatgcaggcaagaaaaatatttcagcagaagatgtctcaaaaatgaatgcagcattcatgcgtaagcatattgcaaatcaaacatgtgattataattacagaatgacaggtgcggccccgctccccggtggagtctctgtatcagccaataacaggcccacggtttctgaaggtagaacaccaccagtatccccctccctctcacttcaggctacctcttccccgtcatcacctgccgactgggctaagaaactcacggatgcagttttacgacagaaagccggagaaacccttacggccgcagatcgcgatttttcaaacgcagatttccgtaatattacattcagcaaaatattgccccccagcttcatggagcgagacggcgatattattaaggggttcaacttttcaaattcaaaatttacttattctgatatatctcatttacattttgacgaatgccgattcacttattcgacactgagtgatgtagtctgcagtaatacgaaatttagtaattcagacatgaatgaagtgtttttacagtattcaattactacacaacaacagccctcgtttattgatacaacattaaaaaatacgcttatacgtcacaaagccaacctctctggcgttattttaaatgaaccggataattcatcacctccgtcagtgtcagggggcggaaattttattcgtctaggtgatatctggctgcaaatgccactcctttggactgagaacgctgtggatggatttttaaatcatgagcacaataatggtaaaagtattctgatgaccattgacagcctgcccgataaatacagtcaggaaaaagtccaggcaatggaagacctggttaagtcattgcggggtggccgcttaacagaggcatgtatccggccagttgaaagttcgctggtaagcgtactggcccaccccccctatacgcaaagtgcgcttatcagcgagtggctcgggcctgttcaggaacgtttttttgcccaccagtgccagacctataatgacgttcccctgccggctcctgacacatattatcagcagcgcatactgcctgtgttgctggattcgtttgacaggaacagcgccgccatgaccactcacagcggactctttaatcaggtgattttacactgtatgacaggcgtggactgcactgatggcacccgccagaaagctgcagcgctttatgaacagtatcttgctcacccggcggtgtctccccacatccataatgggctcttcggcaattatgatggcagcccggactggacaacccgcgctgcagataatttcctgctgctttcctcccaagattcagacacggcgatgatgctctccactgacacgctgttaacaatgctaaaccctactcctgacactgcatgggacaacttttacctgctgcgagccggagagaacgtttccaccgcgcaaatctctccggtagagttattccgtcatgactttccggtgtttctcgccgcatttaatcagcaggccacgcagcgacgctttggggagctgattgatatcatcctcagcactgaagagcacggggagctgaaccagcagtttcttgccgccacgaaccagaaacattccaccgtgaagttgattgatgatgcctcagtgtcgcgtctggccaccatttttgaccccttgcttcctgaaggcaaactcagcccggcacactaccagcacatcctcagtgcttatcacctgacggacgccaccccacagaagcaggcggaaaccctgttctgtctcagtaccgcattcgcacgctattcctccagcgccattttcggcactgagcatgactctccgccggccctgagaggctatgcggaggcgctgatgcagaaagcctgggagctgtctccggcgatattcccatccagcgaacagtttaccgagtggtccgaccgttttcacggcctccatggcgcctttacctgtaccagcgttgtggcggatagtatgcaacgtcatgccagaaaatatttcccgagtgttctgtcatccatcctgccactggcctgggcgtagtccagcctcaacccgcatggaattaagggacacagcgttgtgtccctctgtacatagacccgttttagtccatgcattttttgagatcccggccagattgcccctggcctaaattccatacagtactaaatcagaatcagtaatttcagatggaccggaatatggtttaccatagagggagcgtagtttagtgtcgctgatgatcattttagtattttgtactcaccatcgcatgtacgaacattagcaacaatatcaattggtgtacaaatacaatcaatcaacgacaaaataaaagaataaaatatttcatatacatataacatcaggcgtgtacatcaagtgacagttaaaaacgacagcatacagagcacattcctcttccacgattacgaaaccttcggtacgcatccagccctcgacagacctgcgcaattcgccgcgctccgtacggataacgacttcaacgttattggcgagccggaggtgttttattgcaaacccgccgatgattatctaccgcagcccggcgcggtgctgattaccggcatcacgccgcaggaagcgcgtgagaaaggagaaaacgaagccgctttcgccagacgcattcatgcgctgttcaccgttcctaaaacctgcgttgtgggctacaacaatgtgcgctttgatgatgaagtcacgcgcaatattttttatcgcaacttttacgatccctacgcctggagctggcagcatgataattcacgttgggatctattggatgtcatgcgcgcctgttatgcgctgcgcccggagggaattaactggccggaaaacgacgacggcctgcccagctttcgtctggaacatttaacccgggcgaacgggatcgaacacagcaacgcgcatgatgcgatggcggatgtctacgccactattgcgatggcgcaactggtgaaaacacgccagccgcggctgtttgattatctttatagccaccgcagtaaacataaactggcggcgctgattgacgttccgcaaatgaagccgctggtgcatgtctccggcatgtttggcgcgtggcgcggtaatacaagctgggtcgcgccgctggcgtggcatcctgaaaaccgtaacgcggtgatcatggtcgatttagcaggcgatatttctcctcttcttgagctggacagcgatacccttcgcgagcggctttatacggccaaagccgatcttggcgatcacgccgcagtgccgataaagctggtgcatatcaataaatgtccggtactggcgcaggcgaataccttgcgcccggaggatgccgaccggctgggaattaaccgccagcactgcctggataacctgaaagtgctgcgtgaaaacccgcaggtccgcgacaaagtggtggcgattttcgccgaagccgaaccttttgccgcctcggataacgttgatgcccagctctatgatggttttttcagcgatgccgatcgcgcagccatgaaaatcgtactcgaaaccgagccgcgtaacctgcccgcgctggatattacctttgtcgataagcgcattgagaagctgctgtttaattaccgcgcacgcaattttcccggtacgctggatgacgcagagcagcagcgctggctggagcatcgccgtcaggtgctgacgccggagtttttacaacagtatgccaatgaattgcagatgctttctcagcagtatgcggaagataaaacgaagctggggttgctgaaatcactgtggcagtacgcaaccgagattgtgtaattgaccaatgcctgacgggcattgttaatccagagcggataaatagtgacgccgccatccggtaaacatgctggatgacaaacaaaaaaccggaggcactgcctccggttttactattgccgataatacgcgcgattacgcgacgtcttcgtactgtggaaccgggttgcggaagcttttagttacgcacgccagataaatcagcccgatacccgcccagatcaggcccagtaccattgagctctcttccaggttaacccacaacgcaccaaccgtgagcgcgccgcacatcggcaggaacagatactggaagtgatctttcaacgttttattacgcttctcacggatccagaactgcgaaatcaccgacaggttaacaaaggtaaacgcgaccagcgcaccaaagttaatcagcgctgtcgccatcaccaggtcaaaattaatcgccagcagcgcgatcgccccgaccaggatgatgttcatcgctggcgtacgccatttcggatgaacgtaaccgaagaagcttttcgggaatacgccgtcgcgccccattacgtacatcaggcgcgctacgcctgcatgcgcagccataccggaagccagcacggtgatagtagagaagatcagcgcgcccacctggaaggttttacccgccacgtacagcatgatttccggctgagacgcatccggatctttaaagcgagagatatccgggaagtacaattgcaggaaataggttgcaaagatgaagatcaggccgccaatcagcgcggtcaggaaaatcgcacgcgggatcacgcgctcagcatctttggtctcttccgacaggttactgatgccgtcaaagccggtaaaggagaagcacaggatcgtcgctcccgtaatcatcgggataacgtgcgcatcgccggaccagaacggacgggtgctcgccagcgtaccggcgccttcgccttcaaatacgccataaaccaccatgcccagaatgaccgcaatcagcaccacctgtagcactacaatcacggtgttgaagttagcgaccgatttgaggctgcgcaggttaaaggccgtcataaaggccaccagcgccacaacaaacacccatgacggaatggagggcaccagcgcttcaaaataaattttcgccaacagaatgttgatcatcggcgcgaacagataatcgagcagagaagaccaacccaccataaagccaacggtcgggctgatggatttctgggcataggtatacgccgaacccgcggaagggtagcgacgcaccagtttcccgtagctcaacgccgtaaacagaatcgcgattaacgcgaatgcatacgccgtcggtacgtgaccgtcagtgaggcctgaaacgataccaaatgtatcgaacagcgtcatcggctgcatataggcaagacccatcattacaaccggaactaacgtaagcgttttacgtaattccacgcgagaggtgtttggagtaacgttatgcgacatggtcattctcctttacggcgaatgccgtcgcgtaagcaaaaaattgccccattttctggattcctcagcgacaacaactgtcgatttttaagtaagtatctatccggtacgaagcccggcctcttggtattgaatgatgtgtttgaagcaaaaaaataaccgacgcgtattaaaacgtcggttagtgtcattttttgcaagcggcgtattctgccctaaattgaagtgaaatgacaagagaatgcgagcgcgttcaaaaaattatttttcataagcgattgatttttaaaccggcgattttgcatacaccccagcaatagcattatttgctaaaatttcatcccgccaccagccactggccagcccggcggtctgttcattccagccaacccacaccggttcatagacgatttgcgccacaactttcttctctataagcgcgccgctttccaaaaatcgctgcgccagataacgcggtaaatagccgcatcccaggccgctaatttgcagctccagcttggttttaaaatcaaacacggtaatcgcttcctgagcgtcgagcagttcagaccctattgatcgcgaggaatggacgctatcgccaaccacaatcgcgcgaaaacgtttgatcgtctggcggctaagcggttcctcttcatgaaccagcggatgatgaggggcgacggcaaacaccagttcaaggtcgcccagtcttgcaaagccaaagccggtgtcaggcggcggcgcgcgcatggcgccaacaataatatccgcccttccctgcgtcagcgtctcccatgaaccgccgagaacgccattaacaaatttaaggcgcgttacgctgtggcgttgataaaaagcgtcgataagcggggccagaagagaaaagggaaaggtatcatccacaccgatgaccagttcgttctcccagccttcatgcagtttaatcgcctgcttttccagctcgcgaacggtgtgcagcacttcacggcctttttccagtagcatcttaccggttcgcgtaaatcgcgcgcgatgcccgctacggtcgagcagttggatattaagatcgttttccagcttatgaacggtataactgagggcggacggcgttttaaataattttgccgacgccgccgcgaagctgccttctttttctaacgcatcaagaataatcagaacgtccagcagtggtttcatactcgtccccttgcgctatatggcgaccacctgctggacagcgactcactccatcggcatcaccaacggatcgggatattgatattcaaatcccagctcattacaaatccggctaccgtcgataatcttccctttgccgttgtccggtgcgtcacgaaaatgcggcggcgccattcccagcaagcgcgtcatttgcggataaaacacgttgcgggctggatgcgccggcgcacatatattatagatgtgccctcctttcggcgcctgtagcaagagggtaattgcgccaaccacgtcttcaagatgcaccagattgaccccgtgttgaccatccggcgcggtttttccggcaaagaaacgtccgggatggcgcccaggcccgaccaaccccgccagccgcagaatatccactgacgtgcccggcagattatgcagccaatcttccagttccttcagggtacgcccgctggccgtgaccggattacgcggcgtattctctttcaccacgccttgcgcatcgccgtaaacagacgtcgaactggtaaaaataatacgcgggatacgataagccagcgcgctgtcgaccagctcctgcatcgcctgcagataaaaatcctctcccggaccgctacggcgcgcgggcagtgttatcaccagcgcatcgacatccagcagagcgtcaagatcgtccgcctcacagaccaactccggctccagacgcagcggatagctttcaattccactcatacgggccgcttccaccccgtcaagggtggttttgctgccggtaacctgccagcctctcgctgccagcgacattgccagcggcatgcctaaccaacctaaaccgacaattgcgacctttttcatccattttctcctgactttaacgccttatacataaggctacgccagcccgccgtgactgacaattcatactataaatgcgaaatgaaaaaagcgcttgctttaaggcgtaaaagtggtttaggttaaaaggtatcaaatgaataagcattcatcggaatttttatgacacgcgttcaatttaaacaccaccatcatcaccatcatcctgactagtctttcaggcgatgtgtgctggaagacattcagatcttccagtggtgcatgaacgcatgagaaagcccccggaagatcatcttccgggggctttttttttggcgcgcgatacagaccggttcagacaggataaagaggaacgcagaatgttagacaacacccgcttacgcatagctattcagaaatcaggccgtttaagcgatgattcacgagaattgctggcccgctgcggcataaaaattaatttacacactcagcgcctgattgcgatggcggaaaacatgccgattgatatcctgcgcgtgcgtgatgatgacattccgggtctggtaatggatggcgtggtcgatctcggtattatcggcgaaaacgtgctggaagaagagctactcaaccgccgcgcacagggcgaagatccacgctatttaaccctgcgccgtcttgacttcggcggctgccgtttatcgctggcaacaccggttgacgaagcctgggacggcccggccgcgctggacggtaaacgtatcgctacctcatatccgcacctcctcaaacgctacctcgaccagaaaggcgtctcttttaaatcgtgtctgttaaatggttctgtcgaagtcgcgccgcgcgcggggctggccgacgctatctgcgatttggtctctaccggcgcgacgcttgaagctaacggcctgcgtgaagtcgaagttatctaccgctctaaagcctgtctgattcagcgcgacggtgagatggcacagagcaagcaagagctgatcgataaattgctgacccgtattcagggcgtgattcaggcgcgcgaatcgaaatacatcatgatgcacgcgccaagtgaacgcctggaagaggttatcgccctgctgccaggcgccgaaaggccgacaattctgccgctggcaggcgagcaacagcgcgtggcgatgcacatggtcagcagcgaaacgttgttctgggaaaccatggagaaactgaaagcgcttggcgccagctcgattctggtactgccgatcgagaagatgatggagtgatctgacgcctgatggcgctgcgcttatcaggcctacgtaatgcgttgatattttgggttctgtaggccggataaggcggaaccctgtgatggagtaaagaccatgagcttcaataccctgattgactggaacagctgtagccctgaacagcagcgtgcgctgctgacgcgtccggcgatttccgcctctgacagtattacccggacggtcagcgatattctggataatgtaaaaacgcgcggtgacgatgccctgcgtgaatacagcgctaaatttgataaaacagaagtgacagcgctacgcgtcacccctgaagagatcgccgccgccggcgcgcgtctgagcgacgaattaaaacaggcgatgaccgctgccgtcaaaaatattgaaacgttccattccgcgcagacgctaccgcctgtagatgtggaaacccagccaggcgtgcgttgccagcaggttacgcgtcccgtctcgtctgtcggtctgtatattcccggcggctcggctccgctcttctcaacggtgctgatgctggcgacgccggcgcgcattgcgggatgccagaaggtggttctgtgctcgccgccgcccatcgctgatgaaatcctctatgcggcgcaactgtgtggcgtgcaggaaatctttaacgtcggcggcgcgcaggcgattgccgctctggccttcggcagcgagtccgtaccgaaagtggataaaatttttggccccggcaacgcctttgtaaccgaagccaaacgtcaggtcagccagcgtctcgacggcgcggctatcgatatgccagccgggccgtctgaagtactggtgatcgcagacagcggcgcaacaccggatttcgtcgcttctgacctgctctcccaggctgagcacggcccggattcccaggtgatcctgctgacgcctgatgctgacattgcccgcaaggtggcggaggcggtagaacgtcaactggcggaactgccgcgcgcggacaccgcccggcaggccctgagcgccagtcgtctgattgtgaccaaagatttagcgcagtgcgtcgccatctctaatcagtatgggccggaacacttaatcatccagacgcgcaatgcgcgcgatttggtggatgcgattaccagcgcaggctcggtatttctcggcgactggtcgccggaatccgccggtgattacgcttccggaaccaaccatgttttaccgacctatggctatactgctacctgttccagccttgggttagcggatttccagaaacggatgaccgttcaggaactgtcgaaagcgggcttttccgctctggcatcaaccattgaaacattggcggcggcagaacgtctgaccgcccataaaaatgccgtgaccctgcgcgtaaacgccctcaaggagcaagcatgagcactgaaaacactctcagcgtcgctgacttagcccgtgaaaatgtccgcaacctggtaccgtatcagtctgcccgccgtctgggcggtaacggcgatgtctggctgaacgcgaatgaattcccgacagcggtggagtttcagctcacccaacaaacgcttaaccgctacccggaatgccagccaaaggccgtgattgaaaactacgcgcaatatgctggcgtaaagccggagcaggtgctggtcagccgcggcgcggatgaagggatcgagctggtgatccgcgccttctgtgaaccggggaaagacgccatgctctactgtccgcccacttacggtatgtacagcgtcagcgccgaaaccattggcgtagagcgccggacggttcccgcgcttgaaaactggcagctggatctacaggggatttccgacaaccttgacggcacaaaagtggtgttcgtttgtagccccaataatcctaccggacaacttatcaacccgcaggatctgcgcacgctgctggagttgacacgcggtaaagcgatagtcgtcgccgacgaagcttatattgagttttgcccgcaggccacgctgacaggctggctggttgaatatcctcatctggttatcctgcgcacattgtcgaaagcttttgcgctggcgggtctgcgctgcggctttacactggctaatgaagaggtgatcaacctgctgttaaaagtgatcgccccttatccgctttctacgccagtggcggatatcgccgcccaggcgctgtgcccgcagggaataaacgcaatgcgcgatcgcgtggcgcagacagtgcaggaacgtcagtatctggtgaatgccctgcaacagaccgcctgcgtagaacacgtctttgactctgaaaccaactatattctggcgcggtttaccgcctccagcagcgtgtttaaatccttatgggatcagggcattatcttacgcgatcagaataaacaaccttctttaagcggctgcctgcggattacggtcggcacccgccaggaaaaccagcgcgtcattgacgccttacgtgcggagccagtatgagtcagaagtatcttttcatcgaccgggacggaaccttaatttccgaaccgccgagcgattttcaggtagaccgctttgataaactggcctttgagccagaggtgattcccgtattgctgaagctgcaaaaagccggttttaagctggtgatgatcactaaccaggatggacttggcacgcaaagcttcccgcaggcggacttcgacggaccgcacaacctgatgatgcagattttcacctctcagggcgtatgctttgatgaggtgctgatctgccctcacctgcccgcagacgactgcgactgccgcaagcccaaagtgaagctggtggagcgttatcttgcggaacaagcgatggatagcgccaacagctatgtgattggcgatcgtgcgaccgatatccagctcgctgataacatgggcattactggtttacgctatcaccgtgaaacgctgaactggacgatgattggcgaacagctaacgaaacgcgatcgttatgcgcatgtggtccgcaacaccaaagaaacacagattgatgtcagcgtctggctggatcgcgaaggcaacagcaagattaataccggcgtcggcttctttgaccatatgctcgatcaaatcgccacccacggcggctttcgcatggagattaccgttaagggcgatctctatatcgacgatcaccacacggtagaagataccggactggcgctcggtgaggcattaaaactggcactcggcgacaagcgcggtatctgccgttttggctttgtactaccgatggatgaatgtctggcgcgctgcgcgctggatatttccggtcgtccgcatctggaatataaagctgaatttacctaccagcgtgtgggcgatttgagcacagagatgattgaacactttttccgctcactctcttacacgatgggcgtcactctgcatctcaagactaaaggtaagaacgatcaccaccgtgtcgaaagtttgtttaaagcctttggtcggacgctacgccaggctattcgcgtggagggcgatacattaccgtcctcgaaaggagtgctgtgatgaacgtcgtcatccttgacaccggctgcgccaatttaagctcggtaaaatccgccgtggcgcgccacggttacaccccggtggtcagccgcgaagcggaaatcgtattacgcgctgacaaactctttctgcccggcgtcggcacggcgcaggccgctatggatcaactgcgcgaacgtgaactgatcgacttaattaaagcgtgtactcagccggtactgggtatctgcttagggatgcaactgctgggtcgtcgcagcgaagagacgcgcggcgtggatctgctgaacattatcgaacaagacgtgccgaaaatgaccgactttggtctgccgctgccgcacatgggctggaatcgcgtgtatccgcaggcgggcaaccggctgtttcagggcattgaagatggcgcctatttttactttgttcacagctacgcgatgccggtcaacccgtggactatcgcccagtgcaattacggcgagccgtttaccgcggcggtacagaaagataatttcttcggcgtacagttccacccggaacgttcgggcgcggcgggcgcacagttgctgaaaaacttcctggagatgtaatgattattccggcattagatttaattgacggcaccgtggtgcgtctccaccagggtgactacgcccggcagcgggattacggtaacgatcccctgccccgtttgcaggattacgccgcccagggcgccggggtgctgcatctggtagatctgaccggcgctaaagatccggctaagcgacagataccgctgattaaaaccctggtcgcgggcgtgaacgtgcctgttcaggtcggcggcggcgtgcgtaccgaagaagacgttgcggcattactgaaagctggcgttgcccgtgtggtcatcggttcaacggcggtgaaatcccctgacgtggtgaaaggctggtttgaacgttttggcgcgcaggcgctggtactggcgctagacgttcgcatagacgaacacggcaccaagcaggtggcggttagcggctggcaggaaaattccggtgtctcgctggaacaactggtggagacctatctccccgtcggcctgaaacatgtactgtgtaccgatatttctcgcgacggcacgctggcgggctctaacgtttcgctgtacgaagaggtatgcgccagatatccgcagatcgcctttcaatcctccggcggtattggcgatatcgatgatattgccgccctgcgcggcaccggcgtgcgcggcgtgattgtcggacgcgcgctgttggaagggaaatttaccgttaaggaggccatccaatgctggcaaaacgtataattccgtgtctggatgttcgtgatggtcaggtggtgaaaggcgtacagtttcgcaaccatgagatcattggcgatatcgttccgctggccaaacgctatgccgacgaaggcgcggacgaactggtgttctatgacattaccgcctccagcgatggtcgcgtagtcgataaaagctgggtggcgcgcgttgccgaggtgatcgacattccgttttgtgtagcgggcggcatccggtcaattgacgacgccgccaaaattctttctttcggggcggataagatctctatcaactccccggcgctggctgacccaacgctgattacccgtctggctgaccgttttggcgtacagtgtattgtcgtcgggattgatacctggtttgacgacgccacggggaaataccatgttaaccagtataccggcgatgaaaaccgtacccgcgtgacgcagtgggagacgctggactgggtgcaagaggtacaacagcgcggcgcgggggaaatcgtcctgaatatgatgaaccaggacggcgtgcgtaacggttacgatctgacgcagttgaaaaaagtccgtgacgtttgccgcgtgccgctgatcgcctccggcggcgcgggcacgatggaacactttcttgaggcattccgtgatgccgatgtcgacggcgcgcttgccgcctccgtttttcacaagcaaatcatcaatattggcgaattaaaagcgtacctggcaggccagggcgtggagatcaggatatgttaacagagcaacaacgccgcgagctggactgggaaaaaaccgatggcctgatgccagccatcgtgcaacatgcggtatccggcgaagtattgatgctgggctatatgaacccacaagcgctggacaaaaccattgaatccggccatgtcacgttcttctcacgcacgaaacagcgtttatggaccaaaggcgaaacctcaggccatgtgctgaatgtcgtcagcattgcgccagattgcgacaacgatacactgctggtgctggcaaaccctgtcgggccgacctgccacaaaggtaccagcagctgctttggcgacgccagccatcagtggttattcctgtatcaactggagcagctactggcagagcgcaaaaccgccgatccgaccagctcttacacggcgaaactgtacgccagcggtaccaaacgtattgcgcaaaaagttggcgaagaaggtgtggaaaccgcgctggcggccaccgtcaatgatcgttttgaattaaccaatgaagcgtctgatttgatgtaccacctgctggtgctgttgcaggatcaggatctcaacctcaccaccgtgatcgacaatcttcgtaagcgtcatcaataagcgtaaaaaaaccgggcaatgcccggttttttaatgagaaattttacctgtcgtagccgaccaccatccggcaaagaagcttacaaggcttttggcttatagctacgtagcgcattgcgtcccagcacaatcccggcaccgatcatcccacccagcaatacagccagcacaagggtaatggctgttttcgggctatcgcgacggaccggcagcgtcggcttcatcacataacgatagacgtgcaccgtatcggcagtcactttcagatttttaatgtccagcagtgtctgcttcgtctggtaataggccggagaaaagaccagtggacgcgtcgcttcgttctgtatcatcgattttagcgcatcgctccccaacaggaacatcgtgtcctgggtaacatcctgggtttgctgaatctgcggctgcgtgattttggcctcatccgcatagcgcaacgcttcttcgatttgcttaatacgcagatctttttgctcctgcgccacaacttcctgcgtctcaagggactcctgcaacgttttggtttgcagcgtgatgttatctttcaggtcaacttccagttccttagcgacctcttcatccacctgttggatatattccgccagccgacgctgcgccccttcagcggtagtactcacataagaaaccgagagtggcagcgcctgcccttttaccgactgttcaatggtaagcttttcccgctctttctgattatccagcacttccgataatgcggaaaacgcagagctaaagcggcttataaaattcgcctgcacttcagagattttgggggcattcccaccatacaagacgttgagcgcgttggtataggtggcaacctgcgcggcatcaggttgggtaataatcgccgtggatgtccatttttctttggctatcatcaggtagcctacagccagcaaaatggcgataataacggctacaataatggtcatcttcccacgccataactgtagcaataactcaatcaaatcaatctgttccggatcgttcccacgcccggaagacgtattactatccactgtcatagataccctaactaaaaaaaggatgaagctggagacagtgtagccataaagcaaatatatgccataggattaatgataaaaatcagacattatttccatttggtcaataaatcatcgggactcatcagccccgattgccttattaatcactaccgaaaagatcgcgggtatacactttttcagcgacatccaaaagctctgccgccatcctgttggaaataatgacatccgcctgctgtttaaagcagtgcaaatcacgttcaagacgtgagttaaagaaagtatcttcttccattaccggctcatagatgatgacctctacgcctttcgctttaatgcgcttcataatcccctgaatcgatgaggcgcggaagttatcggagccactcttcataatcaggcgataaatgcccaccactttaggctttctggcgaggatagcgtcggcaataaaatctttacgcgtacggtttgcttcaacgatagcggagataatattattaggcaccgactgataattggccagcaactgtttggtatcttttggcaaacaatatccgccataaccaaaagagggattattataatgattgccaatacgcgggtcgaggcacaccccttcaataatttgtcgggtatttaatcctaacgtttcagcatagctgtctaattcattaaaataagcgactcgcatagcgagataagtattggcgaaaagtttaatggcttccgcctcagtggagtccgtaaacagcgttggaatctcctgtttaatagcgccttcctggagtaatgcggcaaattctctggcgcgctcagactgttccccaatcacgatacgggagggataaaggttatcgtaaagggctttaccttcacgtaaaaactccggagagaaaatgatattttctgtcgcaaacttctgacgcattgccgccgtgaagccaaccggcaccgtagacttaataatcatcactgctgcggggttgatgctgatcacatcctgcatgaccgattccacactggacgtattaaaatagttagttttgggatcgtaatccgtaggcgtagcaatgatgacgtaatctgcattctggtacgcatcaaacttatccagcgttgccctgaatctgatgttatcttcctttaaaaattgctgaatttctttatcaacaatcggagatatccgatcatttaacagttcaacacgggaaggaacaatgtctaacgccaccacatcatgatgttgtgcaataagcaaaccattagacaagccaacataacccgtcccggatatcgtgattttcattattcgctctcagaattaacttaattatgaatcatgatgtatttcgcatcctgataagatattaaagttttaacgcctgagtatataaagtgcaacgcagacgaaaacaattcagattatcttcattacgataaacacagattattaagttaatattaagcaaaagcgataaatcaataagaatagagataaaaaaaagcccggtattaaaccgggcttaaacatttttgcagaaattattccaaccattcggtatggaaaatgccttctttatcagtacgtttataggtgtgcgcaccaaagtagtcacgctgcgcctgaattaagttagctggcagtactgcggcgcgatagctgtcatagtaggccactgccgcagagaatgtcggcaccggaatgccgttctgcaccgcgtaagccacgacatcgcgcagcgcctgctggtactcatcagcaattttcttgaagtaaggcgctaacagcaagttagcgatatcggcgttttctgcgtaagcatcggtgatcttctgcaggaactgagcgcgaatgatacagcccgcccggaaaatcttagcaatctcgccgtagttgagatcccagtgatattcatcagacgcggcgcgtagctgcgagaagccctgcgcataggagacgatcttgccaagatacagcgcgcgacgcactttctcgataaattcagctttgtcgcctgccggctgcgctttcggcccggagagcactttagatgcggcaacacgttgcgctttcaacgaagagatgtaacgcgcaaagacggattcggtaatcagcgacagcggttcacccagatccagcgcgctctggctggtccatttaccggtccctttgttggcggcttcatcaagaatgacatccaccaggtagtttccgtcttcatcttttttagtgaagatgtctttagtgatgtcgatcagatagctgctcagctcgccgttattccactcagtaaaagtgttcgccaactcttcattgctgagattcaggccgcctttcagcagggagtaagcttcagcgataagctgcatatcgccatattcaataccattgtggaccatcttgacgtagtgaccagcaccatcggcgccgatataggtcacgcacggttcgccatcttctgccacagcagcaatcttcgtcaggatcggcgccaccagttcataggcatctttctgaccgccaggcatgatagatggccctttcagcgcgccctcttcaccaccggaaacaccggtaccgataaagttaaaaccttccgcagacagctcgcgattgcgacggattgtgtcctggaagaaggtgttaccgccatcaataatgatatcgcctttttccagatacggtttcagcgaatcgatagctgcatcagtacctgcgcccgctttcaccattaacaggatacgacgaggcgtttcgagggattcaacaaactctttcaccgtgtaataaggcaccagctttttgccgggattctcggcaatcacttcttcggtcttttcacgggagcggttgaaaacggagacggtataaccacggctttcgatgttgagcgcgaggttgcgccccatcactgccataccgacgacgccgatctgttgcttggacattacatactcctgtcaggtgtggaaaccctgccacaaacggtcatggcaggttaaaggtgaatagtatgttaactcaaaggtatgatattaaggtagcgattgatgcgttcagattttacgcaggctaatttatacaattattattcagtacttctcggtaagcttaatacgcaccatctcgccgcaaaacaactttcgctgttttaaacagaatggcaatatcattccaaagcgtccagtttttaacataccaggaatcaaaataaacacgagtgtcataatcaacatcattacgcccactcacttgccatagacctgtcatgcccggctttgccatcaaataataatcaacatcatcacaataacgctccagttcatccgaaacgataggtcgtggtccaaccaggctcatatcaccttttagtacattaaaaagttgtggcaactcatcaaggctagttttacgtataaatcgacctacagctgtgattcgaggatcatttttcagtttaaaatctttctcccattcagccctggcaataggatcgttagccaaaagttcttttagtacctcttgagaattcataaccatagaacgaaatttgtagcatggaaaaagttttccatgccgacctactcgctggtgaccataaatagccggaccaccatctcgagtaactttataccacagataaatcataagtggtgatgcaattataagaatcattattgaacaaacaatatcaaatgtccgtttgagaaaacgggacgaccttttagccaagttattttgtatccttaataacataacttcatggctaaagataaaagacatatcagtattatataatggcaatcctctaaacgaggggactacagtaacagaacgacaatgatgttttgaaagttcacgtagccaaaaatgtgttttctccaactcggtgtattcataagcaaggatataatggacatcacctgtacgatttaaatcccaaataatctcagtatcctttatcaccggcaacatatttatttcagcatctgacgcatccgtatcaaaaaaagcgataacatcaaaccccatcatctcctcactttgcagcgcagaatatgcaccacgagcattctgtccgctccccaggatgatagtttttttcttccagatacctagcttgttcaataaatgctttgtaagtgcgcgaaaaaaaggcaccaggattagggcaaaagtccaacaaaacacccagacatagcgtgaaaactgccattttgtaaacgctatcagagccaaatcaaatatagcaaaaataacgatcgtacgaaaaatttcttttaactcataccaaaatggcttgcggtatgtataatgtcgcaaacgaatccaaaaccaaccgacacatactactgacaaaataaaatgcgtaataactcttgtatctaattggtcttgaggaataaatcgctgtacttgatcaaaaataaaatagacacatcctaatgaaaaccataaggctaaattaaaaaaaatcaaatccgatatagccaaaaaaattttacatagctgtggattatacttattatcaatattatccatttaatcctcaccctctgaccgtgcataatgtaaataaaataggcatattaagtaaataacattcaatttttttacagcaagcatcgttttttaatattagcaagcgttgtatttacaagatcctgagccctatttaataaattagcttctgcatagcagcgtaactcaggtgcattaccagaagcgcgcaaatgcacaatacatccatcacgtaaagtaattcgcataccatctgtcatatctgtagaaattgcaccttcattctccaaaccaatatagcttaagaggttgctcagattttctctgcccatactaattaaggattgacttttatcagttgtaatcccctgtaatctgtcagaatgggtgtaacgagttgggagttcattgactaaagcgctaatgctggtattcctacttttgtaaagcagcattattgctggtaatacagcatcacgagttggtaaggcatgaagattctgctcgttaatacagatgtcgcttcctaataaaaaaccgccattggcttcaaaaccgacaatacgactataactccgcgataattcattaaaagcttcgataacataaggcgagccaatttttgtaagcttaacatgtttaaaaaagcggccagaagaaattatgctgttacaactaacaggaatagcgacggcttctgcatccaatgcaagtgaacataatagacctagtatatcgcctcttagccactcaccggcctcatcagcaataagagggcgatcaccatccccatctgtcgagaatatggcatctaaatcgaactctttagcccatgagcgagctttttcccgatcctctttgcttacagcctctgtatctataggtacaaaattatcgcttctacccaagctaacgacttcagcccccaatgcaataaataaaggcttataaagatcacgcccagcgcttgaatgttcgtaaataccaatacgcttatttttcaggaatggagtagaaaataaagatgtataacgagatatataattaacagcagccatttctgaaactatgagttctttaagctctaaatggctgcacgtatcttcaacactaaggatcgcagcctcatcatgtttcgtgatttcaccatcaggacgataaaacttgaggccgttccgctcgaatggaatatgacttcccgtaaccattatcgcaggcatattgtcagacatagactgaaaggccaaagctggggttggtaccactccataaaaaatacagttaacgcctttatccgccaatgcagcagcacacgcctgagccatcccataactacttggacgattatctattgccaatgctacggtatcaaaggaaaaatgttcctgcataacggcaacaaatgaaaccgtaaaagcagcacatacctgaggtgtaaaatcttttacaagaccgcgagccccactcgttccaaacacaatacctgatgaataaataacatcacggctattattaactacgttcattagtccactccttcgaaaatccagaacgttgttctaaacgaataatatcatcctcaccaagataggtacctgattgaatctcaattaacttcaggggggtcattccaggattttccagcgcgtgaatagtattcggaggaataaatgttgattcattttcagaaaccatataagtctgctctccctttgtaacacgagcagtcccggataatactatccaatgctcagcccggtggtgatgcatctgcgccacaaatttctcacccggcttaacagtgatacatcgaacgaggtaatttttgccgctatcaatcacattatattttccccaggggcggaaaacttcttgatgttgtttatattcgttcctatcattccgttttaaataatcgacaatttttttaacatcttgtactgtatctttattagccaccagtaaagcgtctgttgtttgaacaatgacaagattgcttacaccaatcgcacttataaacatatcttcggaataaatgtaattatcattacaagcatgtgcgaaaatatctccttttaaaacatttctctgatgatctttattcgatatatcccaaagtgaggaccaggaacccacatccgaccagccagcgctcattggtatcaccaccgcatgctgtgtgtgctccataactgcataatcgatagaatcactcgggcatgacataaactcttctttatcaatacgaataaaatcaagatcgggatttatatgtcctaccgccttttcacaagctttataaatttcaggtgataaatactttaattcgtttaaataagagcttgcacgaaataaaaacataccgctattccagtaatatttccctgatttgaaatagtcaccggcggtatcgatatccggtttctccacaaattcagccactgcataagcgtcatttcctatcaactcaccacgacgaatatatccataacccgtttcagcatgcgttggaacaataccaaaagttacaagcttaccatttgcagcgtattcttcagcatgtctgacagctttcgtaaaagctatttcatcctgaatcacatgatctgcagcaagaaccaacaaaagaggatcagcattatcagcattctggagcgcacaaaacgcggcaagagcgatcgctggtgcagtattacggcctaccggttcgagaataatattatttgctaacttgtcaatttcacggagttgttcagcgactaagaaacggtgtctgtcattgcaaatgacaacgggttcttctgtagaaagtgaagctaatcgctttatagtattttgcagcattgatagtttaccttcaacgcttagaaactgcttcggatgatattcgcgtgaaagcggccataaacggctacctgtgccgccagccataattacgggaagaaaagacatttattttatctcttttgacgaagaatattggatattattccaataactcttgtacatgctaaaatagcgacatgtagacaacggtaaagattgccaatgcttgcctaatttgtaacccaagaatttagcaaaggttgttaataaagctcttggaatccagaacggtgcatttttaagcaggaattgaatctctgattttacgaagcggaaaccctcaccaccggctccgccaaagtcacgctgaatccacggagaacaagcatgaaatacaccagtatcaaaatatcgttgaaactcttctcgcggggtataattatgggagtgtcttaccaccgcttcagcgcagtaggcgaccttataacccgcctgaatcatcttagccgccataaacatatcctcggcaagaattgtatgttcaggaaacccacttaactcttcaaaaacggaacggcgataggcagcaaaagaattggacataaatacagttttaatacccaatttttctatatctgccttacttttaacaatagattttgaactataattaaaatttctggcatgcactgcaaggggattagcatctttatgaggaagttgtctaccacaaaccgctgctatcaatggatctgaaaaataataaaccaaatttttaattgcatccgaatccgcgagaattgcatcttgcgttagaaaaattataacatcagcgtccagagtttttgcaactgctaaatttctggttcctccatgattaaaatctttagagtcaatattaaatattgatatatttttcaggtctgaggctaacggaaccgtttcatctttagaacctgagtctataacaatcaatttatccggatatatagtttgctgcttaatcgcatccagaacattaggccaaagcgaccctgcattatatgtgggaataattaatgttattttcatttattttgattccgccaaccaattgccaaccatctgcttcatattatcaaagtcataccgtgcgacatagttgttaaatcgggaaattgcatcaggcaactgctctatatttttaattgcactctgccagcttttttcatcatccggattcacatataatgcaccattggttaacacttcatgaaatactggtatatcggacactataactggagtatttgatgccatcgcttcaataggaggtataccaaaaccctcatcaatagatggataaacaagcgcgtaggctttagaatataaaatctttaattcattaaatgagacttcatgtaaaaaagtcactttatcttttagttccagatcaacgaccatttgttggagagacattgcatagtcagtacgaccacatacaataattaaattataagagtcagaccaaacttttttattttttatgaatgaatgaatatttttatgtggccaacttgcaccaacagctaaaaagtaattctctttttcttttttttgtataaaatcagatttattaacactattataaattactgatattttctcactatctacattataagttttagcaatgctatctttaacggtataagataccgttaaaacatgcttacatcgcttaacggacatttttaataaaaagcgaaaatacactttctgaataaaactatctggataataaaaaggtcttatatcatgtacggttatcgtttggtttctcagtaaggggatagtgtgatgtgtagtacacaccaattttttattaccaaacttaattaaaaccctcagcgcaagccagtaactatatacataccatactaatggtctaagtcgcgatgtttttgatgtgttgctaacaatattcggaacagtaactactgcataaccgagcttttcaaaataatcagcgtgtaccttgctacagattattgcgtcaacatcagctatttctcgcagtgccgttaaaaatttaatcgagtattgccacattcccgtaccacttttacctaaacgtgataggtttacgatcattgaatagctctccgtttttccatacgcatctttaaagcaataatcataaggataaataatattacgaagcttacactaggtgtaattcttaataatagagttaatgtaataccggcagtaaaacactacaaaaacaatcataaagaaatatattattatactaacattcccagaaaaaaacatctaagtagttaagctatccaaatttatttatatatatcaaatatgatttttcattaaaaagaaaagtcagtaacgtaaatctagctgaatccagaaaggttaaatctacatttaatctcaatataataacttactactacttaattatccgtttagtaaaattcttaagcacggtaatatttttcactgcatatgctagtttcccaaatcgaagtacagtgttgatcatatttttattacaacctagctttgcataaaattcagataaatctcttttttcatcactattgccataacatgccatagccaaagttgtatataaccatggtctctcttttagcaaaacattttcaaatgctcgttttaaagatatatttttactgtaaaaatcattagctaattttaaatatgcaataaaatcaattaaaattcgtctggcctttcctttcttctcgaaactatcattatctcctcggcatattacgagtggttttgatatataatgcaaaaggcaccctggcgtattaaatacgctcatcatgataaatacatgaggataggaagtgccaatataggacgcatcaaaatcaatggcatcccatcgttctttttttactattaaagaacttagatagctaaatacaccaccaatagataagcatctactgagatagatttccctatctaaattattattaaacacataaagttcatcatctgttctgagccaagaacgatgagggtttctaatctcaactaaatcacacccggtctcttttctgtcacataaatatatatctgcttgagaatcgagataagtttgtaatatcgctaacgagtctttcgcaagagcatcatcactgccaaatatccaacaataatccccattcgcaagggatactgaagcaagaaaattcctatctggcccaaggttaacgctattacgccgatatattattgggaaattataattgttcctccaaacatcaatcatttcctctgtaccatcagtagaggcattatctgatatacatatctcaatatctaaattaaatttttcctgattatttatactattcaacaactcttcaagatattcttttctattataagttggaatacaaaatgatataagcatatgattatcccttatttgccttaattaagtaagttagtggaagcccccaaaaaacagttaaagcaaaagatataatcaagccaagcagcactccactgattccaagcgtactagaaaaataccattgtgctattccaccaattattgcttgtagtggtactaatatccaaagtatttttaaataattcatactttgcaataacattgcataagtgtcacaccaaacgcgaatacagaaatatatgccaattaacataaaagataaaatagaaacttgataattaatatctttggctattactgaaaatatctgttctttaaataaataaataaatattgtacatccaacaacatatagtgagccaagcaaaatattgacacctatcattttgttaagttttttccattgctgtttgactctcaattcagcacatataggccataatgcttgcaaaatagcagtataaataaaaaagactaaaccaaaaattttcatcgttactgtatattgaacaatatcagcaggagttagcctttgagaaatgaccatataatctgtttgaagcaccactatcgataataaagtaaaaagaaaaaaccctgaagatctacgtaaaattgctatataatgagattttgttgttttaacatgataaagctttatgtatctatatacaatatagcacaatgaaatcatacccactggaagatacaggactattagtgataattttatgtcaactgagatccccctatagtatatatatagcaagccgagcatacctatcatataagataatgcgtttaatagattagctttccacccgaccaattcggcaaaaagtattttataagcaatagctccgattccaatagaactgaaaaccagacatgaggtaaaaaagagcattctggttttgtcctgtaatacctcatgaaaagaagaaagatatttagcggaaattaccccagaaaaaatataaaataaagcaataaaaaaaataatagctataaagcttagatgtaatgctgatttaatatatgcatcataacttttgtttttggctctgcattctgatatataattttgcagtcctgtacctatgccaaaatcaacagcgctacaccatactaataaaccagttaacaaactaaagattgcatatttctcttcacctagtatagaaataagatatgaaatacttgctaactgcaccccggcaattattattttggataaccatgatgaacctgcaacaattaaatgactcggaatttttaacaattgaactttcactatgcaattaaacgacttagtttttacaacataacgcgactaatttgttaacgatttatttattaaaagatcatgaaaatctcataaccgtttcagtagttcttcaattccttttttataatcgaaatttggtttccagcccattgcttttaaatttttattatttgctacagagaacattatttcattatctctttgctctatcgcaccaaattcaaatatactcgatgaacctggcatcatagtattttgcaaataaaccagaaaatctttcaaacttaccccagcaccagttccaacttgatactcagtatatgaaggtacttcttttctattttctaatatagttaaataagcatttaccacatcatctacaaaaataaagtctcttatctgttcgcctgttgtacatttcacgcaactctgttttttatttaagcagtcgataatgtatggaataaatttattttcaccatccccaggcccatatacatgctctaatcgcatgtttacaaatgaaatgtcatgcatattagcataataatgcccaatttcatcaaagtgtcttttagtaattatataaggccgcatatgttgataattaaaatctttcttggcaaaaaaactatctgtatttaaaaagatatccgcccgatattttattgccaaatcaagaagctttaatggttttataacatttgcatcttcaatatttatgagagatgatgttttatgcccatattctgttgccaaatgaatgataccaattaatgcagaatcaattgataactcctcgactaataattcgatattatcccaactgcaccatctaacattagctaatgcattactattattttttattacatctcgagtgattgcgacaactgaaatccccgatttttttagcgcttcgagtaaatgcttaccaataaagccggaagccccactgacaattacatattctttcaaaaaggtcatcgcaatcaccagatagaataaattgaattagaaattcaaaccaaagaactcttcaaacttgctaactacataatctaaatgctctgtagtcaagcctggataaataccaatccagaacgtttgattcattatacggtcggtatttgtcaactcacccactacacgatatttcacattagcaaaatacggttggcgaatcagatttccagcaaacagtaaacgtgtaccgatttttgcttcatcaaggaatttcaccagttcgacacggttaacaccgctagtttctttcagggtgatagggaagccaaaccaggatggatctgatttctctgttgcttctggtaattcgaggaattcagtgcaagattgcaagccctgtttcagataggaaaagttagctttacgctgctctacaaactcttctacgcgctccaactgagccagaccacatgctgcctgcatgtccgtgattttgagattatatccgaggtgggaataagtatatttgtgatcatagccttgaggaagtgatcccaattgctgaccaaaacgtttaccgcaggtgttatcgcatcctggcgcacaataacaatcccggccccagtcacggaacgactcaataattttcttcagttcacctgacttggtgaatacagcaccgccttcacccattgtgatatggtgagccggataaaaactaacggttccgatgtcaccaaaggtacctaccatctggccttcataagtcgtcccaagggcatcacagcagtcttcaatcaaccataagttatatttatcggcaatccgacgaacttcactcaggttaaatgcattaccgagtgtatgagcgatcattatcgcttttgatttctcagtaactgcagcttcaatgagagaggcatcgatattatatgtcgggatatcaacatccacgaataccggtattaaaccattctggatcgccgggttaactgtagtcgggaagccagcagcgacagtaataacctcatcaccaggtttgagagctcgctcgcctaattttggggaagtcagcgcagtcagtgccagcaagtttgccgaagagccagatgttgtcgttaaaacatgaggaaccccaataaattccccaagttttttttcaaaggcatcattgaaacgaccagtagttagccatccatcaagagacgcctcaaccatcaattgtaactctttggcaccaataaccttcccggaaggaggcacaacgcttgtacctgcaacaaaaggtttcgggctcaatgcctcattcgcatactgagcgacaagctgagagatttgctcacgcaggttatttgctgtcattactttgattccttaaacttattttcttaacgagtagttgcagacatatagtcgctgatttcacgctttgaacaaatcaacatatcttcgccgcgaatccatgctttatgccattttacgatgcgaccaagtgtttcagtcaatccccaacgcggatgccatcctaattgcatatttgctttagagcaatccagtttcaggtaatgtgcctcatgaggatgattctcaccatccagtaaccagcttgcatcatcaccccaaagcgtgaccatcttgtcaacaataaattcgaccgtcttcgcatcttcatcacgcgggccgaaattccatccttcagaaaacttagcaccttctgtatataagcgttgcgccaccacaatgtaaccagaaagaggctccagtacatgctgccagggacggatagaatatgggtttcgaataataacctgctggttattttcaaatgagcgcagaatatcgggaattaaacggtctttagcccaatcgcctccgcctatgacattaccagccctcacagacgccaaaccaacgccatgttgctcataatttgcaggattgaagaatgagttccggaatgcagacgcgactaattctgcacaacctttactattagagtatggatcgtaccctcccatgggttcgttctcacgatagccccacacccactcacgattgtcgtagcacttatcactggtgatatttacgactgcctttatgttacctacttgcttaactgtttcaagcaaatggacagtacccataacatttgttgagtatgtttcgattggctgttcataagataggcgcactaaaggctgggctgccatatggaaaacaatttctggcttaaattctgcaatagaattgcgcagcttttcaaaatcacgaatgtcgccaatatgagattccataagatcattaagacgcactatctcaaataaacttggaacagttggcgcatcaagtgcatagccttttacaattgcacccatttcagtcagccatagcgaaagccagcttcctttaaagccagtatggccggtaacgaatacacgtttaccttgccaaaaatttttatcaatcatctagttactcccaggttttccacggagctttacctttttcccacagcccttcgaggtaaactttatcacgtagggtatccatcggctgccagaaacctgggtgttcaaaagccattaactccccctgttgtgccaatgtcattaatggctcttgttcccaggttgttgcatcgttatcgatgagatcgataaccgatggattcaacacaaagaaaccaccattgatcattgccccatcgcctttcggtttttcctggaatgaccggacctgaccagctcggatatctaatgcgccaaagcgtcctggtggaaaagtagctgttaaagtcgctttcttaccgtgagccttatggaaatcgatagtcgctttgatatcaaggtcggcaacgccatcaccataagtaaacaggaaagcctcgtcatcttttacgtattcagcaacacgtttcagacgaccaccagtcattgaagaatcacccgtatcaaccaatgtgacattccatggttcaacacgtttatggtgaacttccatacggttttcagccatatggaatgttacatctgacatgtgaaggaagtagttcgcaaaatattctttaatcacatatcctttataaccacagcagataataaaatccttgataccatgcacagaatacattttcataatgtgccaaagaataggcttgccaccaatttctaccatcggttttggttttacaattgtttcttcacttagtctggtaccaagtccaccagccaggatgaccgctttcataaattatcctcaatattattagatgcggtaaatgcatcagaatagaaatgttctacagagagatttttcatcataaagtcctttttactggcatcgatcatcacaggtgaaccacatgcatatatatcgaagaactctagagaatcaaaatcatccatcacggcatgatggacaaatccctttcttcccccccattcggcgtcatcaccagaaacaacagggatataatgaacgttgtcgtgctgttcactccactgctgcggtaatgcagagtaaaaatctttactatattgcattccccagtaaatgtagatctcacgacgacattttccctgaatgagatgctcaaccattgatttaactggagcgaatccagtaccgcctgcaaggaagattataggtctgtcactttcacgaataaaaaatgttccgcaaggcccttcaatgcgcataagagtattttcttgtaactccccaaaaatgagcgaactcatctgaccattgggaacattccttacatgcaactcaataccattcgactcatcactattagcgatagaataactgcgagttacacctttataatgtaaattgatatactgccctggaaggaagccaatttttgctgttggtggtgtgcgtaacttcaaagtcataacatcgcctgaaaccagtacagcactatttaccttgcatgggacaattttttttgtctgtccagctagttcaggaaaaaaatgcgcatttagctcaagggcggttttaggtttacagcagcaggttagtattttatcaccctgtccaaaaatattacctttggagtcaacaacttctcccgccaacaaatcggactcacagataccacaatcacccgctttgcagctatgttcaagatggataccagccgatagcgcagcatcgaggattgattcatcctctctaccggaaaattcaatatttgatggaaaaatcttaataatatgagacacgatgcttactctgttaacaaggcttgatccagtaaaggtgctgcagcatcttttgctgaaagctcaggcagctgagaaaaaggccattcaatacctattgcctcatcattccatagaatgctaccttccgatgaaggtgagtaataattagttgctttgtacagaaactctgcatactcactaagagtaacaaaaccatgagcaaaaccttctggaatccaaagctgtcgcttattctcagcagacagatttacaccaacccattgaccaaaagtaggcgattcttttcggatatcgaccgcaacatcaaaaacctcaccgacagcacaacgaactaacttcccctgtgcattttctcctctctgaaaatgtagccctctgagtacgttctttttggattttgaatgattatcttgaacaaatgtaactttacgtccaatcaactcttcaaaggtctgctggttataactttcaaaaaagaatcccctctcatcgccaaaaactttaggctctaagatcaagacatctggtattgctgttttaatcacaatcatcacttataaacctttcaccatcttcagcaaatatttgccataatcattttttgataatggcccggccagttctataacctgttgtgcatttataaaatttttacgaaatgcgatctcttccgggcaggacacttttagcccctggcgttcttcgatggttgcaataaaattactggcctctatcaaactctgatgcgtccctgtatccagccaggcataaccgcgccccatcatagcgacagacaatcttccctgctccatatagatacggttaatatccgtgatttctaactcaccgcgagcggaaggcttaagatttttcgccatctccaccacgctattatcataaaaatacagccccgttaccgcgtaattactcttcggttgtaatggtttttcttccagactaacggctgtgcccttttggtcaaactcaaccacaccgtagcgctccggatcgtttacatgataagcgaagacggtagcaccactttctttattaacggcagcttccattaactttggtaaatcatgaccatagaagatattgtcacccagcactaatgcacaatcatcatgaccaatgaactcttcaccaataataaacgcctgtgctaagccatccgggcttggctgtactttatattgaagattcagcccccactggctgccgtctcccagcagttgttgaaaacgcggcgtgtcctgtggcgtactgatgatcaggatatcccgaatgcctgccagcataagcgtggaaaggggatagtaaatcatcggtttatcataaattggtagcaattgcttacttaccgccatggtcaccggataaagacgggtgccggagccccccgctaaaataatgcccttacgcgttttcatttccatttctcattcatagaaaatgccctgatgggcatttaaatttattagatggttgtcgtcgtaaacatttcagtcagcatacgcttaactcctaattcccattgaggcagaataaggtcaaaattacgctgaaacttttcagtattgagacgcgaattgcctggtctgctcgccggcgtcgggtaggcgctggtcggcacagcattaagctcagtcagcgcaagcgttatccctgctttgcgcgcctcgtcaaagactaaggccgcgtagtcatgccaggttgtggttcccccggcaaccagatggtaaagacctgcgacttctggtttatttaacgccacacggatcgcatgcgccgtacagtcagccagtaattccgcaccggttggcgcaccgtactgatcgttaatgactgaaagtgtctgacgctctttcgccagacgaagcattgtctttgcgaaattattgcccttacctgcataaacccaactggtgcggaagataaggtgtttagggcagttatcctgcagggccttttctcccgccagtttggttttgccatagacattcagcggcgacgtagcgtccgtttcctgccatgggatatcgccggtaccaggaaatacataatcggttgaataatgcactacccatgcgccagtttcgttggctgctttagcgatggcttccacactggtggcgttaagtaactgcgccagttctggttcagactctgctttatctactgcagtatgggctgctgcgttaacaatcacatcgggacgaagcttacgaacggtttcggcaacgcctttcggattactaaaatcaccgcaaaactcttttgaatggacatccagggcaatcagattccctaccggtgccagagaacgttgcaactcccagcctacttgccctgtcttaccaaaaagtaagatattcattactggcgtccttcatagttctgttctatccaactctgatacgccccacttttaacattgtttacccattgagtatttgcaaggtaccattccactgttttacgaataccgctttcaaaggtctccagcggtttccagcctaattcgcggctaattttacctgcatcaatggcataacgacgatcatggcccggacgatccgcgacataagtgatttgttcacgataagaagtcgctttgggtacaatctcatccagcagatcacagatggtaaataccacatcgagatttttcttctcattgtgtccaccaatgttataagtctcccctgccttgccttcagtcactaccatatgaagcgcgcgagcatgatcttctacatatagccaatcgcgaatctgatcccctttgccataaattggcaaaggctttccttccagtgcgttcaaaatgaccaacggaatcagtttttcagggaagtgataagggccatagttattagaacaattggtaacgatcgttggtagaccataggtacgccgccaggcacggactaaatgatcgctggatgcttttgacgcagaataggggctacttggcgcatatgccgtcgtttcagtaaataacggcagcgtaacgctgttttcaacttcatcaggatgcggtaaatcgccgtaaacttcatcagtggaaatatgatgaaaacgaaaattattttttttatcttcgccaagggcagaccagtatttacgcgcaacttcaagaagtgcataggtgccgacgatattggtttcaataaatgctgctggcccggtaatcgaacggtccacatgactttccgcagccaaatgcatcaccgcgtccggctggtactgctcaaaaatacgcgttatttcagcggaatcacaaatatccgcgtgttcaaaattgtagcgattactttcagaaatatcagaaagggattcaagattaccggcgtaggttaatttatcaatattaactacagtgtcctgtgtattcttaataatatggcggacaacagctgatccaataaaacctgccccgccagtaataagtatcttcacttttctattccataaggcgtatttaatgtggtatttaatttgccaataaaaattaattgctcaagtcgttacacacgctaccgcccctggctcatcagctaccagtgcactgcgtacatatcgacttgttgcaaacctcgcccagcagggcaaagctcactaaaacttaaacgctaattgtcttattaattgcatccggaaacaaggattaatcttataaaatcagcattaaaatgctccagataaccccttgttacttaagccctttatacaaaactaaaacggcagtcaacactcgtttcagccaacttgccgcttcgaatgttcactgccgttattatgtttatcaccaaccatttatcacggttgttaatacttattcatgcaaaagctgctctatgctcttacggaacttggctccttctttcaggttgcgcagcccgtacttcacaaatgcctgcatgtagcccatttttttaccgcagtcatagctgtcacccgtcattagcatcgcgtcaaccgactgttttttcgccagttcagcaatggcatcggtgagctggatgcggccccaggcgcccggttcggttctttccagttccgcccagatgtcggctgaaagcacataacggcctaccgccatcaaatcggaatccagcgtctgcggctgatccggtttttcgataaactccacaatccggctgactttgccttcattatccagaggttctttcgtctggataacggaatactccgataaatcacctttcatgcgcttcgccagcacctggctgcgacccgtttcattgaaacgcgccaccatcgccgcaaggttatagcgcagcggatcggcggtagcatcatcgataataatatccgggagtaccacaatgaaagggttatcgcccacgaccggacgcgcgcacagaatagaatgccccagccctaacggctgcgcctggcgaacgttcataatcgtcacgcccggtgggcagatagattgcacttccgccaaaagctgacgcttaacgcgctgctcaagaagtgattcaagttcataagaggtgtcgaagtggttctcaacggcgtttttagacgcgtgagtcaccagcacgatttctttgatccctgcagccacaatctcatcgacaatgtactgaatcattggcttgtcgacgatcggtagcatctcttttgggattgccttggtggcaggcaacatatgcatacccaaacccgctaccggtataactgctttcaaattcatcattgtttcttccacctgtaaaatggttgctgaattatagctctttagcttgttttcgccagcatgaattactctgctgccagggataatgatggcacgctctacattacgtcttagtcggcaccataacattaagtatgaacaactttttcccaggaattttcgtaaaaatagcggtacttaccctccccgcttcggcagcgaaaaattcactgcttcgacattcacggtttggtgattaatcctgtcgatatccacggaactctgcccgttttcattgatggcatgaacattagcgagggaaagcagcgtgtcctggcgggccataaattgaccacgtacatctttacgcaaatcgaaatgcatttttaacgccgggccaatcgctgaagtttgcatcacgttgatattgcgcagaaagaggtgctgcggttgattatgcagttccagcgtagcacgcgtcatccgtacattggtgatggcgacaaaagagggggtgttgccggaggaaatttgaatgccgcgtaatttataagcaacctggcgattatccaaccgaatagcgtttaatttaaagttttgcggaattgacaggtattttcctttaacgacgccatagccgatgagcatcccggcactattcgtcatatcaatattatcaatgacgaaattatcacagccataaattgcgatcgttgcgttatcaatacccgcatttttactgaaaccgggcgtgatgtttttggctttgacattgcgaatgacgaaatgtttgccattttctacgtgcacaagctgtcggcaatcagatccggtaatattggccaccacaaagttttttactgcctggtcttcaggataactgttgtcataggtgctacccgccagcccgatgccgatcccccagttgattttgccattggtacaattaatgcgttcgatgacatgatcggaaatcaggatgtcgcggtcgtgaatcgcgacattccactcaatggcgtccccctgtaaatcgctaaagcggctatgcgtaatccgcgcgccatccatttggttatgaaatccctggcggagaatggcgtagttggcgtgggtaacggtgatgtcatcgataatgagattacgcatcacctgcggttccttaccaccgatgaaaatttgcgcgacggggccaaagccgctcatcgccacgcctttaatcacacagtccgacccgcgaacatccagcgtcacattgtgcagactgccgccctgctcccccaccacctgacacccgtcctgcaaaataaaccgtccccggccattcccacgcaccgcgccctgtacccgcagcgtttttcccgccggaatcgttatcgccgcattgatattttcacacacccatcctggcggtacgaccacggtctgtccgtcggcgaaggcctgtttgaacgaggcgataccgtcatccgccggataatccttaatatcgacggtctcgcgaggttcacgcgcctgtaccggcaaggcgcgcagaaaaggaagaacagcaagcgcagaacctgccgtcaggagggtacgtcgggagaatttagtcgcgggcataccacctcgtttatatcgtttgtagcaggctggctaactggcgattaatcgcctgctgattaaaatcttgcgccactttttcacgggcgcgcgtgatcaccgactccagcgtgtcgtggtcaatccggctgaactcagcgagtcgggccgccagcgcctgcgcatcgttttccggcaccagccagccggatttgccggcctccaccagttccggaataccgctatgcacggtagataccacgggaatccctaccgccatcgcctccatcagcgctaccggaataccttccatatcgccatccgtaccggtaatcgacggcagcaaaaaaacatcggcgtcatccagcatcgccttcacttcatggctcggtttaaaccccggcatctcaatgacatcctctagctgatactgctcgatgagcgtgcgcagccgacgttcccacgggccaatccccagaatgcggtagcgaaacgccacgccctgtgctttcagttgccgacaggcttcaatcgccacatgcaggccttttttttctgtcaggcgcgcgacggaaatcatctccagcggcatccctggcgctttcaccgaacgatgggtaaaacgcgtcatgtcgacgcccatgcgcgaaacggcaatcttttccggcggacagcccatacttttcaggcgaccggcccacagatcgctgatgggcagcatcagatcgccacgacgaaacaactgctgatactccggcgtgtaatgactgagcacctcacgactagagatatcaatcccgtggaaaatagtcgcgattttgccgcgaagcacgcccagttcgcgtagtttggccgccgtcacgcccgccggaccaaagtgtgcgataaacacatccgccacaaaaggctggctcacctgcgcgcaaatcgcggaaaggatcaaattgcgtgattcatcgccatagcgggtaaaattgagcgctttccaggtcgccgcccgatgcagccccggcagcgttttacatgcccggtagcgcagtttcgccagccgtccctggggctcatcctgtaaccagcgggttttcgccgccaggccatacttctcccaggcggcgtgagtatgttgggtatcgcctttttgtaacgcgacaatctccacctcatggcccatatcaataaacgcagtaatctgattcagcacaaaggtttccgatgagagtggaaatttcagcagaaaaaagctgactttcattgcgcctcccgaattctgtcgagaacagatttgatcatcgtgaaccctttcgcccgctcctcggtgacggcgttagccacttttgcctttagcgcaggcaattgattgagcgtatcggccaccacgctttgtaatgaaccgttcagcaagtgacggatatcgatggccaattccgccaggcctagctgctgcataatcccggcggatttatgttcataattaatggcgatggcgggtgtgccaaaattcatggagataatggcggaatgcaggcgcgtcccgatggtcagtacgcaggaggcgaggatctttccgatttccacgtcattgagttcgtccatcgcgatatggaaattctctgagtcgtttacatacttcgccatccgtaacgcaaccatccggtcatcgcggttatagcgatcgatactggtgcaggttgacagcgccagtacctgataaccgtccgcaatcaggcgattcacgacctgggcaaatgcctgctcataggcctgctgagtggtgcccaggcgtttatcaaacggctccagatcgcgcaacgtaatcgcgacggttttgcggcgcgcggtgacgtccagccagtgctgcacagcataactggcaacaaactcgtcgtgacggcgttcgactaaccaggcggtatccaccccctgctccactttccgggtatcgatctgcgcggcggtcatcagatcgcggctgacggtttcacgcaggatcagcgcactggtgcgcccaaaaacataattggcgagctggttaaagtcaggattctggaaagggccgacgctatgtcccaccatataaattggtttgttcgccataaacgcgcacagcggatattcaaagtgagtcaaaccgtataagtcgacatagtttgaaccgcccacctgaatgacggcgtcatactgcgcaataaattgcgcgaattcggcaaattccggcgcgatagcaaaattacgcagcgatccttcctgggcgactttagacaataaaattttatgctgaaaacgacggcgtaatacttttttcacccgaccgttaagccctgccgccgcctgctgtttctggcttaactgatacagcgggtcggcaataatcgggcgcccctgcaaccaggcggaactcaccgggaaacggctcatcacatccatctccgcctctggcgcctgttgacggatggcatcaagcaaaccgcgcataatggcgctatcaccacggttgccgcatgtgtggttgcctaaaattaataatttcataaatagcctcttatatccccgtcatccgacacgtaataactttttcatttttgcactgccaacaagctgatttttaatttccatcaccagcgcattgcgtgaaaaaataatcattaaaataaaactcaaaataccgaccataacctgtagcgcgaatacccccgacaacggtaaataaccgtcgaccagctttcctgcgccgtagctggtaataaatgttggcaatgagagataaaacggtagccacaggctgagaatatactgacgatagctggagccgagtaccggcttaatcatcacgaaatagctcagaatggtgttgatgatttgcaccaccaggaaccccagcgtcacgccaatcgcccccgccagatggccgccaatgggaattgccgggataaacagaaacgttttaaagacgttgaacttaaagctgatatccacgcgcgctttcgccatcagcagcgaaccaatcgggttgccgaccgagcgcaacagccccaccacgcacagcaattgcaggatcgggataatgctgttccacttctcgccaaacactaacggcacaaaattgttcgccactaccatcaggcccaacagcgcgggaaaattgataattcccaccacggaaagcaacttatagaagttgacgcgcagcttctcggtatcgtcctggattttggcgaatgccggaaatagcacgcgagtaatgatggggttaagcttcgccggcggcacaacagccacgttgtacgcgaggttatatcccccggcgacgcttgcgccgagaattctcgccagtaccagcgtcgataaattcgtgttgatgtaattgacgatactgtccgccgtcagccacgcgccaaaacgcaggttcgtggacaccgatgccagcgaaaaatgcagccccggacggtaaatcttgcggccaaagtaaccaaacagcagcgttcgcaccgcgctgttcaccagatagccgagaatcgcggttagcgccagcggccagtaatgggcgctaatcaccgtaaaggtgaaccccgccagcacggaggtcgtttcgatcatgccgatcttattgaactccagctctttttgcatcagagcgcggaactgctgcccgtgagggatcacgataaacgccagcgacaacgttttgattaacggcgcgagatccgggttatgcaaaacatgggcaatcgcatcgctcagccaaaagaccaccgcaaataccacaatcccaagcccaacgtttagccagtaaagcgtggtcagctccagatgcccaatcgttttacgctggataatcgagttcgcgatgccaaagtccgagatcgtgtcggccagcgcgataatcaccagcgagacggtcaacaggccaaactggtggttgtcgatgatccgcgccagcaccgtcatctgaattaaccccagaccgataatcactatcgtggcgatagccgaccatttagcgccgctgatcgttttttgtcgtaaactcattcttttctccagaacctgttcacaaggcatcattggcgcagccagattgaatacggacagcgcggaaaaaccggagcgtacacgctgccctggtgcaatatggcaagtaaaatagccttgtgggtcaggttcttaatacgccgctttattaacaaaccctttaaaaatcgtcagaaaaacgattttgatatcgaaccaaatactccattcgcggatgtattccaggtcgaattccacgcgtttttccattttctccagcgtatcggtctcaccgcgccagccattaatttgcgcccagccggtgatgcccggcttcatcttgtggcgtagcatgtaaccttcaatcaactgacgatactgttcgttgtgcgccaccgcgtgaggacgaggaccgacgatggacatcccgccagttaatacgttgataaactgcggcaattcatccagtgaggtacgacgcaaaaagttacctacccgggtgacgcgcggatcgttttgcgtcgcctgggtaacgaccttatcgttctccatcaccttcattgagcggaacttccagactttgatcggcttgccgtccatcccgtagcgcgtctgacggaaaatcaccggcccgggcgagctcaatttgaccgccagcgcaatgcagcacagtaccggtgagatgagcagcagaatcagcgacgccagcacgatatcttctgcccgtttaagcagacggttaatccctgatagcggcgtgtcatatagcggaacgaccggaacgccgctcatctcctccacgcgcgagtggagaatattaaaggtgaacacatcgggaataaggatcaccgagcaggtggtgtcggccagctcgcgcaccagttttttcaccatggcgccgtcgctcatcgacatggcgatataaacattgtgaattcgcgaggctttcgcatcgtcaattaactgctcgaagttcccggcccagtcagcagagacgccgcccggtttgggatcgtgatagacgcccaccacctcaaaacccagccacggctcattacggaagctatccagcaacgcctggcccgcaggcaaatctccggcgacggcgacccggcgagtgttataaccacgattgcgtagccagcccgcgccgaaacgaataaatgaacggcataacactaagcccaggctggacaacgcataccaggccagccaggtggcgaggcggttgtcaaagtcatcattaaacgccaccagaccggcgctgaagatcaggctcagcgtccagttttgcagtaacagcgttaactctgtcgacattttgacgccgcgccaggagcgataaaaatcggttatcccgcccagcatttgaaaaacaaccagcgtaatcagcgccaccaacaggtgcatgtacaggaatggcagtccactgacttcacagatgaaccacagcccgccaaacatgatggtgatatctgaaaagcgttgcaccatagagattaacgatgcattggttttggctcgttcgcgcttttttagatttgtcatcgttgttcctgtgattggccccttacccgcaggcggtaaggggagatctgacgttactgattcagcagcgccagcagagtgcgtgttcgcgcttccatcagcggaatatcgccgcgtgattccacattcaggcgcaccaccggttcggtgtttgacgagcgcaggttgaaacgccagtcggcgaacgacatgctgaggccgtccgtgcggtccactgcctgcgcctcttccgcaaagtgcgcttccacccgcgcaatggccgccgccggctccgccagtctgctgttgatttccccgctcgccgggaacgccgccatccggtcgcgaaccagctcacccagcgactgtctcttcaggcacaccagctccgccaccagcagccacgggatcatcccgctgtcgcagtaggcaaaatcacgaaaatagtgatgcgcgctcatttccccgccataaatggcatcctccgtacgcatccgctccttgataaaggcgtgcccggtttttgacatcaccggcgtcccgcccgccgccgtcaccactgcctccgtgttccaggtcaggcgcgggtcgtggataatcttcgcccccgggtgtttttccagaaatgcttccgccagcagcccgacgatgtagtacccctcgataaactgccctttctcatcgaacaggaagcagcggtcgaagtcgccgtcaaaggcgatacccatgtccgccccgtgttcaataacggccttgcgggtgtcgtcgcgacactccggcagcaacgggttgggaatgccgttcgggaaggtgccgtccggggtgttgtggattttgatgaactccaccggcgcgcccagcgccttcaggcgcgcttcgatggcgtcaatgaccggccccgccgccccattgccggcgttaaacaccagcttcagcggggtgagattgttaacactgatatagccgagcaggtggtcgatgtaggcgtcgcgcaggctgatttgtctgtagctgccgcgcgcggcctcgttcaccggcgggaagtcgcccgcttccgccagacgctgaacgtcgcgcagaccggtgtcgccgcttatcgggcgggcgccctcgcgcaccagcttcataccgttgtagtccatcggattatggctggcggtcacttcaataccgccgtccacgccaaggtggaaggtggcgaagtaaatctcttcggtgccggacataccgatatccagcacgtcgacgcccgcgtcctgtaaccctttcgccagcgccagcttcagcgcctcgctggtcaggcgcacgtcgccgcccagcacgacggttttcggttttaaatattcgccgtaagcgcggccaatccgccacgcgatatcttcattgagctcttcgcccagcctgccgcgaatgtcgtaggccttgaaacaggttaattttgtcatgtgcttccccttcttcaggcaacagttagccctgaccgtaaatggccagcatcgttattgttattcattgccggatggcgcgttgcgcttaccgggcataattgcaggcgtcagacccgcccgtaacgatcctcgaaccgcaccacgtcgtcctcttcgagatacgagccggaacgcacttcaattaaatcgagcggtatttttcccggattttccaggcagtgggtcgcccccagcggaatatagatggactcgttttcaccgagcagcttaacctcgccgttgatggtgactctggcggtccccgccaccaccacccagtgctcggcgcggtgatggtgcatctgcaccgacagtccttcccccggcttgacggtaatacgcttcacctgatagcgctcgcccgcgtcgatggagtcgtatttgccccacgggcggtaaacctcgcggtgcatgtggtgctcatggcgtccgtcggccttgatcttctccaccacctttttcacgtcctgcaccgcgtggcgatcggcaatcagcacggcgtctttggtctgcaccaccaccagatccttcacgccgacggtggtcaccaggccggattcggcgtaaacgtagctgttttccgttttatggctgatgacgtcgccgtggtggacgtttccctccggggtgtgggcgctgatttcccacagcgaggaccacgagccgacatcgctccagcccgcatccatcggcatcaccaccgcgtccgccgttcgctccatcaccgcgtagtcaatggactcttccggacaggcgaggaaggcctcttcatccacacgaatgaagtcaagatccggatcgacgccgcgcatcgcctgttcacaggcggccagaatatcggggcggaactttttcagctcttccagatagcgtccggcgcggaacagaaacatgccgctgttccagtagtaatcgccgctggcgacgtaggcctgagcggtttccagccccggcttctcaacgaactgcgccacctcaaaagccaccgcatccgtcgcgcccggcacgacatcaccgcgccggatatagccatagccggtttccggcagatccggcacgataccgaaggtcaccagtttgcccgcgtcggcatagggcatggcgccgcgcaccgcgtcgcggaaggcctcttcattggcgattgcatgatccgccgccagtaccagcatcagcggatcgcagtccgtatgctggcgcgtcgccgccagcgccgccagcgcaatcgccggcgcggtattgcgcccggcgggctcaagaataatgttctccgtcagcttattgagctggcggagctgttcggcaacgataaaacggtgctgttcgttacagatcaccagcgggctttcgcactccacgccgttcagacggcaaatggtggtttgcagcatggtgagatcgcctttcaggcacagaaactgttttggataaagcacgcgagaaagcggccacaatcggctaccggagccaccggccatcacaaccgggtaaagttttgtctgacgcattatcatccccgaatatctgcaataaattggcgtagcacgttctctttattgagcgtgcgttcggcgtattcacgtgccgtcgtgttgtttttcggcatggcgagcgcctggctaatcccgttgaccagcgcgtcggtcgactccggttccacgcaaacggcgatgcccggatagcgcgcgcaaagttgtcctaattcggtgtgcggctcagcggtaatcaccgcattaccgccgaccgccagaatgttagtcagcttggagggcagtaccgcatccgccgcgccgcgcttttgcaccaccaggtggcagtcgcccattttcagcagcgcgggtaaggcgtcgtaaggctgcagcgggaggaatttaatatttgccaggccgcgttcgcgggccatgttctccagccgcgccttgccgcccccctggccgacaatcgcaaaaatcaacggtcgatcgcgtaatcgttccgcggcgtcaattaccttttccagcccttgcttttcgccgatattgccggaatagagcacaatttttttgccctctggcaagccaagctgctgacgcaaagccgtcacgtcagcgtcattaacgtcctgaaagcgcgccacttccgaccagttcggaaaaaagaggattttttccgccgcgacgcccttttcccgcgctttattcatcatggagcgagagatggtcgaaacattatcaacgttacgcagcgcgctgcgttcaaaggccgtcgctaaccgcgctacgctgccgcgcttgccttttcccgccattcctaagccgagcatggcgtccacttcgtaatcctgaatatgcagtacggtacgcgcgccggagagtgtcgccagcagacgcattcccggcgtacaaaagagcgtcggtacaacgccgataatccgatccggcttccagcgacgctgcgccatcagtgggaaaaaactgctcaatgcaaagctccccagatgaagcagtcgttttaaggtggagggctgtttcggcacatacagcgggcagcgccagacggtagcctcgccctcttcccggcgatagcgccaggcggaatagcgctcaccgaccttccactgcgggtagtacggcggcgcagtaatgacccgcacctcatggccttcctgcgccatccacgccaccatttcgccggtatatttgccgataccggtcagttccggcgaatagttaatgccatagaccaggatcttcataggcccaccgccggcgcgtcaggagagaagtaggcccgactgttctcatgaacattgtcgcttgccagaagctgttccggcgtcagccagcggtaactgccatgctgggcatcaggcaggcgtaaatcgctctccgccacgcgcagacgaaagccgagcacgatgtagtgagttgaaaaatcctcaccggaaaagttgtcgtcatagaagtgctgccagacgccataaaacgtccctgccgccagcggcagacgcacgcccagttccgcctgcgtcaggcgtgcaaaggcggcctccagcgtttcgtctttgcacacccgcccccccggcacaaaccagtagccctgcgccggacggttgagacgctggcccagtaaaatttccccctggccgttttccacgatgaaatcgagggagatgaggggcgtggcccgcaccacggcggcgaaatcttcctgacgtaaaaacattgtcacccccggaaccgttgctgattctcaaggaaccactggtaagtaccggcaagccctgcctccagtgaaatttcgtgataccagccaagctgatgcaggcgcgtgacgtcgagcaatttacgcggcgtgccgtccggcttcgcggcatcgaacaccacccggccctggtaacccaccacctttgcgatggtctgcgccagctcgcggatggtgcagtccacgccagtgccgacgttaatgtgcgacagcatcggggcagtgttctcctgccacacttcgcgcgccagctccatcacgtgaatactggccgccgccatatcgtcaacgtgcagaaattcacgcatcggcgtgccgctgccccacaccaccacctccggcgcgtggctctgcgcagcctcatgaaagcgacgcagcagcgccgggatcacatgtgaattgtccgggtggaaattatcatgcgggccgtacaggttggttggcatcaccgaacggtagtcgcgaccgtactgccggttgtaggactcgcacagtttaatcccggcgatcttggcgatggcgtacggctcgttggtcggctccagcgtcccctgcagcagctcgctttccgccatcggctgccttgccagtttcggatagatacaggacgaaccgagaaacagcagtttgttcacgttgtgcaggtgcgcggcgtgaataatgttgctctctatcatcatgttttcataaataaaatccgccggatacgtgttgttggcgacaatgccgcccactttcgccgccgccagataaacctggtcgatacccgccccggcaaagaacgcctgtaccgcgcgcccgtcgagcagatccagctcatcgcgggtgcgcagtaccagttccacgtcgccgcgctgcgcaagctgccgtacaatggcggagcccaccattccgcgatggcccgccacaaaaattcgttgcttattcattctcaggactccagcgcgatggccacctcataaccgtgagatttcaacagtgagtgttttttcgcggcctccagatcgttcgccaccatctcggagaccatctccgacagggtgatttccggtttccagcccagtttctcatgcgctttggacgggtcgcccagcagggtttccacttccgccggacggaaataacgcggatcaacggccacaatcacatcccccggtttcacgcccggcgcatcgtgtccggtaacggataccacgatccctttctcattaatgccttcgccttcaaagcgcagttttatccccagttgcgccgctgccagctccacaaactggcgtacggaatactgcacgccggtggcaatcacgaaatcttccggctgctcctgctgtaacatcatccactgcatccgcacgtaatctttcgcatgaccccagtcgcgcagcgagtccatgttgccgagatacaggcaggactctagtccctgggcgatattggcgatggcgcgggtgatcttacgggtgacgaaggtttcgccgcgacgcggggactcgtggttaaacagaatgccgttacaggcgtaaataccgtaggattcacggtagttaacggtgatccagtaggcgtacagtttcgccaccgcatagggggaacgcgggtagaacggcgtggtctctttctgcgggatctcctgcaccagcccgtacagttcagaggtggaggcctggtagaaccgcgttttcttttcaagaccgaggaagcggatcgcctccagcaggcgcagcgtgcccatcgcatccacatcggcggtatattccggcgactcaaacgacaccgccacatggctcatcgcgcccaggttgtagacctcatccggctgcacttcctgtaaaatgcgggtcaggttggaggcgtcggtcaggtcgccataatgcagatgaaatttcgggttgcagctgtgcgggtcctgataaatatggtccacgcgctcggtattaaacgatgacgcgcggcgcttgataccatgcacctcataccctttttccagcagaaattctgccaggtaagacccatcctgtccggttacgccagtaatgagagcgacttttgacattttcatttcctcaaatagtcccgttagggagtaactttctgaacgcgctggcgcgttaccactgcgggattgccccgacaaatcgcatttgccggtaatgatttaaatacgctgctgcgcgcgccgacgacggtgccatgacctatcgtcacgccgggcgcgacaaaaacatcggtcgccagccaacatttttcgccaataacaatcggcgcggcattaatatcgaaatgggcgctggtataatcatggctaccggtacacaaataccctttttgtgaaataaccgcatgtgcgccaatattaatttcacccaacgtatataacacagcgtcgtcgcctacccaggcataatcgccgacggttaatttccacggataggtaatttttactgacggtcgaataaccacattctttccaattttggcgccaaacagacgcagcaaaaaggctcgccagcgatacaatatttgcggcgacccggcgaataatgtcgcctgtaccgcccaccataattgtacttttagcgcattagcgccgcggaaccccttcggcaccgtaaagccgctaagatcctgcataataactcccggtgattagactttgttataccgcgcttttgttttacccgtcgttttcagacgtaataaataggataattgcgcccaaaatcctggcacacgtaatatttttcgctgtacgttttttgcatcctgacataattccagattattcgaggttgacacgccgcccattgaaaattcagataccagtccgttaattcgccgaaaaggatagcctgctttatagagacgggccgccagcgcataatctgaagagacatgatattgcagatcataaggatacttttttaacgctgccgtcgggaaaaatatcgcctgatggctggctggcaaactatggtagatataatacccgggtttagccttccggcgtattttatgcccgccgccaaaatccagcagcgcgtcgccaatatacatcgcctcgcccttttgtcgcgccagttggcggacaaacagcgcggcatcatcatggaacgcatcaccggaattaagaaacagggtatagcgcccctgcgccaaggcaatgcctttgttcatggcatcataaataccgcgatccttttcactgataaaacgcaggttaaactcaccgtgacgtttttgcagaaattcgcgcgtgccgtcctccgaaccgccatccactacgatccattcaaatgacagacccggatcgcgcgccagattgcgcagcgagcgccaggtttttaccaccccttcgtaattgcgaaaggcgacggtaacgacgcttaaaaacatgcaaccaccccgttatgaaatttttaacgccttgcgcaaaatgaacggacagacgattaaaaaagcatattccgggctaaatattgaaccggtaaaaaacagcgacaccggcgtaaaaagatagagctgcacccgaaaattgcgattatcgccaaacgcatttagcgccatttttaaaactttccccatataccacagcgtcattagcactgcgaaccaggaaaaataaataatcagtagatacaatccattgtctatggttttcccgacatccgcaccgttaaagattccgaatgatgcaacatattcataaagtgagccaaatctgactacaccatcaatatgggtcaaggaatatccgaccatgactaaggggcccacaatacgataataagaagatgagccttccgtccctaaatcgccaagtcgtgtcgcgatataaggaaatgcaataattaccccaaccaaaaacagggttaatgagaccagcgccagtggaagttttttctttatcgcatccttattcaaatattggaacgcccactccagaaggtaaaacaggataaaggtcattacccctgaaaatgatcctgataatattatccctgccagaatcatagcatcgcttttcggtgttttgataccaaactgtttgatgctcagccaaattgagattagtgccaaagcgaaaaatgccggttcaaaataaagcgcagtggtacgcttaccgccaaattttatgaagttcagtacgtagctattactgtaaatgagatatttcgaaattccttccataatactgctgccgccggtaaggataatttgcgccatctccaccgcggcgagcgcgaccaccatacccaccaccagataaaaaaaacgcaaaatctttcggtggttatgcgcggaaatggttttgaatcggatactccagaccatcccgataatgaccacaatatagacaaacagcatcgtggacgtgacatatttaccggcattcagcgactggccgaacaggaagttaaatgccgtaagccccgcgccgatgcctaaggcgatcatcaatttttttacgctaatgcgttccacaaataacagcagcaacagcggtaaaaaagtgacgatggtaatgggaaagctttcccccagttgggcaatcttgacattgaccagtaggtagatcagcggcagcagcagatagctacagattctgatagaacgagacatactcctccagcatctgttgaccgctgtacgcgacgcggctacgcatacgaaaggcgtccagcgtggcgccaaataccgcctgagcaatctctggcttacgccgctgcgccaggcgcagtacatctgtagcggcaaaagtctggccgccggatttcgccagcacctcctgcgccgcctcgctgtgggtggcgattaccggtacgccgatcgagagcgcttcacacaagatcagcggatagttatcgacccgcgagctaaagaccagcgcatccatctcattgagcgcgctcattaatttgcgcttatcggtttcaaaaccgtgattaacaacgttttggccggtaaaaggcgaaaatttaccgaaggtatgcagttcaattttttcgcccagcgccatcatgtcgtgtaccagacgctggtcagttttgccgtcataacgcaagtcatgcgccacaatggcaattcgcggttttcccggattcagcggcacaggtgatagctgcgcgagaatcgcctcggtcgccagatcgataccgttgttaataatctggcagcgccccgcgccataaacgctgttaaaggcctcggccacgtgctggctcggcgaaataaaccggcagcccagccgcagcatgtcccgaaagcgctgacgtttgccgtcaataagctggtgcgcccgatccaccctaaccggcggataattgcttagggtcgggcatttttggcagccgcttttccagccctcgcaaccgtcggtgaaggcgcaacgcccggtgacgctccagtgatcgtgcaacgtccagaccagcgtgacgtctggtttttgcgctttgactttttcgcaaaacgtcacgatgtccgccaggtttagccagtaactgtggagaacatgaaaatgcagcaccagcgggccggatgtctggataaccgtgcggtaaagattgtcgagattgccaaacagatcgcgattcaggaaacgaaacagcgcgatattagcgattgccgtgccgcgcggcgtctgttttatcacctgcggataacggtggtggctgacgcttttttttccgcctttgccataaccataaacaaaatgcgacgtcagccctttttgcagcgcccgcagatggagatccaacgccactcccgccgcgccgccttccgccagccgtacattaaattgcagaatattcatgtgctgaccttcacccgtgctttttctcccaccaccagcgcatgatccggaatactgtcaagcaccacgctacccgcgccaatcgtgacgtgattaccgatagtaatatcgccaagcaggatgacattcgcccccagctcaacgccgttaccaatcaccggacaagccaggctgtccgcgccgcgattgccaatggtgacgccgtggcgaatggtaaaatcgtcgccggcgacgacatgtttgttgatcactaccgcgtaaccatgatggatagtgaaccgccgaccaatggtcgcggcggcctggatttcatacccgaacaggcattccgtgatcacgcgatacagcaccagcaccggcgcggcccacagattattcagcacattctttttgcgccagacggaacaaaaatgagcgatacggtaggccagcaccatgcaacaggggcgtaagctccagctattcgcgcgtaagtcttccagcatcgttatcgcccccgcagcccggccgccagacgtttgctattacgcacggagagcaacgtcagcaacgtgcgccaggtcattcgcttattgcgaatttggtacagggtaaaaagctggtattttttactggcgcgatcgaatttatctttgtgcttacgataaaaatggaaatagccggagaactttttcggcgaagaggtaatctgcatctcgccgtggttgatatgtaaaatttgcgtcgcctcttcgactttccacggttcgccatactccaccaccatgcgcagaaaaatgtcgtagtcctgcgccgccttgagttcggtatcgaacaaacacgctttaaaacgccaggcccaggtaaaaacctgattgccaataatattgcgcttgtagaataagcggcgcgaataaggggatttcggatacagcggcaggctggcaggctgagagtagacctcgccctcgcacacatagtcgttggcatacaaaaaggcgtgcgtagtcaactggtgtttatgggccagaaacacgctcagacggtttggcgtccattcatcgtcatcatcaataccggtaatgtagtgcccttgcgcctgcataatggcctggttgcgaaccgcgcaggcgccggtattcctggcgttatgggtataacggacgcgcgggtcgttcagctcctcaacaaattgttgtagctgctgataagatgaagagcaatcatccacgatgatcatctcccagtgacggtagtcctgacgtagtactgatttaatcgcccggatagccaactgctgcctgttccaggttggcatataaattgagatcagcggattgtctgttgtcatgcttattccccagatagttttgccgcatggcgctacgcttgtccggcctacagtctcaggccgcgccatccggcacgccttattttttatttggaatctgactggtattcatactcgtaatagccataatcctggtagcccgtcgcccggcggaaaatggagttgagaatgacgcctttgacctgaatgccattctggtcaaaacggctcagactggtttccacctcttttaaggtgttgacggcataacgcgccaccatcagcgtcgtcccggcgtggcgacccacaatcgcggcgtccgtcacggccagaatcggcggcgtgtcgattaataccagatcgtagcggctgcttgcccaggcgatcagctcgccgaagcgctcgctcatcagcagttccgatggattaggcggcacctgaccgcgcggaataagatcaaaattagcgatcgccgtgggtttcgcgcaggaggctatctcgcctttgcccgccagaatgtcagataagccgtccacgttattggtgccgagcagttcatgggtgtagcccttacgcatatcgcagtcgatcagtaatacccgtttatgcgtctggctgatgacggccgccaggttggcgcaaacaaaggttttgccgatagagggactgacgcctgtgagcatgagtacattattttgcgcctgcatcatggcgaaatgcaggctggtgcgcaggctgcgaatcgcctcaatcgccagatcggtcggattgcccaccgccagcagttggctctgcttgtaacgcttaattcctttaatggttttgacgctatcgcgcgctttttgccattccgacagcggaatactggcatagacgctgatcccgtgctcctccagcgcctgcgggctttcgataccgcgattaaacagcgagcgcagcagcacgccgacaatcgataacattaatcccagaataatgctgccgagaataatcaacgcctttttcggcttcagcacgcccggctgggtaatcgccgggtcaacgatgcgcacgtcgccaacggtgctggcttcggtgattttcagctcctgctgtttattaagcagttgcatatagacctgctggccggactccacatcgcgggtcaaacgcacaatctcctgctgggttttcggcattgccgtcacccgcccgttcagtttggctttttcatcttccagcgctttacgtttttccagcagggtgcggtaagccggatgcgctttggtaaagagcttggaaatttccgcctctttaaacgtcaactcattcaactgggcgtcgatattaaccatcgaatcgagcaccgccttcgcctccagcggtaaatccaccgagtctttatcctggcggaaagcgtttagcttgttttccgccacatccagacggctgcggacttccggcagttgttttgccagaaacgccaggctcttccccgcctcttcagatttccgcgcaatatcctgttgcagatagttacgggtaatactgttgagaatttcgcggatctggtcgcgatcctctcccgtgaacgtcaggctcagaacgccggtatctttgccggtttccgttacggtgaggttattttgcaggttattaatcatgccaagcgttgagaatttactcaccgtaaattctgtatcaggacgggcgtcaatcgcctctacccgcatcgtcacgccgtctttattgagtggctggcccacaacgccctgcgcgctaaatccgccgtcgctaaccaactgataacgtttgtcgcccagcactttgagggtgaagatctgtccgctcatcgtctctggtcgggtgaatgtcgtgactttcaccatttcattgtgacgtcccatcagccgttcccacccggcgccgaacagcggaaaggtgtttttggtgacggcaatatccagatccagatcgtcaacggtcttccccagcaccaggcgcgatcgaatgagctgaatttccgcatcggaagccggcggcttattcgctaatgcgctattgatatcctgtaccagcgaattaccggcgttttgttcaatctgtaccagcgcatcggcgctatagatgggcgtggcgaagaacgtataaattaccgcgcacagcgcaaatatggccgtcgtccccaacacccaccaacgcgcttcaatcaccgttccgaccaggcgcccgatatcgatttcatcgctacccgtaaccgccgcagattgttttgctttttctgtcatggttttccctgctctgcattcagtgcctgcgcccactggcgggcagacctttccagtaatgtgtacaccgcctcaaacgcatcgcggcttttgcgatacgggtccggtatttcacgctcgctgtcccagtgaccaaacagcattaccttgccgcgcatttccggcgcaatgtcgcacagggcggcgatgtgacgtttctccatcgtcagaatcaggtcatattcccggcacagacgcgcggaaatttgccttgcgcagtgattttccaaagacagatcgtgggcgctcgccacgctcgccgccgcaggatcggcgcctttgccgaccagtgcgcctaatcctgcggacgcaaccgtcagcgagggatgaaagcgttttagcaaacgttccgccgtcggggaacggcaaacattccccacacagaccactaagattttgttaaacataacgattaccaggaatgaatgtcgctggccgtatccgtcatataacggacaccgctaatggttggcagcaactgattgatcagacggttccagcgagcaaccggcgcggtcgtgacgtacaccacatcgtaaggctgaagtcggaattccgtcgccatcaccaatgacgtggcgtcagacatatcaagctggtagatattggcgatcttgccgccgcgtcccccctcgcctttcaacggacgaatcacaaaaatgccgctggcgttggaggtggtcagatcaatgccttccgcattgcctaatgcttcggtgagcgtcatgccgctgaaatccattttgagggtgctctgttttttcacttcgcccatgacaaagactttcagatcgtcattgcgcggcacatacagaatgtcgccagggtagagcaagcggttctggctaagatcgccattttgcatcagcgcctgtagcgaaatgcgctgttctttgccgttgtgcgtcaacacgacgttgcgccagtccgccatatcggtcaggccgcccgcagcgttaatcgcatccaggacggttagcggtacgttagtaatagcctgctgaccggatttattcacctggccggagatgtacgctttttgcgagcggaaagcggcgatattgacatccacctgcgggtccgcaatgtacttcgctaaacgcccggtaatatcgctacgaatctctgacaaagttttaccgacgacgctaaccttgccaatgtagggataaaacatggtgccgtccggctgtacccagttgccggtatcgcttgagctacggtactggcctgctggcgtggtcaattccgggtgatcccagacggtgacattcagcacatcgccaggcccgacgcgatactgatagctggcgatctcctggtccagcgacatattcggttgcgcgacattgggccgcgggcgtaattgctcaaccaaccgtggcgtcagcggatacacattgaccatccggtcgagatcaaagtcagcgtcttgctgtttgatcacatctttccccatcgtagacatattgctgcccggaagtactgtgcaaccacttatcaagctgagcgacgccaataatggcatcaatttcattttggatttcatcattgattatttatcactttggcagagtcattatcctgtgcaatttaaatagcggcttcgtccgtgcacatttaccttgcagttaatagcagagaaaattaactggcatcattctgaaaaaaaatcaattcatccgcaggctattgacagaataataaaggcttatattcaggctttcaggcacgctaccgcccctggcttcttagctaccaatacactgattattctaaattttcgcattcccctcagattttatcctcgttcagataaaaatcttcagcgaaataaaggttacgtattaatagttttctcgatgtcgtgacaggatatttaagcgcgctatcttaatcctgcaagaattgttgcagctaacctaatgacaggcaaggtaacaaacccgccattctatatttttaagattaatattaaatgaattaacagatgattttaggattttattgatgttgacaatatttatttactccactccacctgcgatatttcctaaatatattcttgacattatttagtttctgacagaaacattacggctattttaaagttattttatagccgcgtaacaaagataaattgcgctgcggcattgcatttttccgccgtattatccatgatcgaattgtgacaattgtcatattacagaaggtattgctcttactatggaatggattgccgatccgtcaatctgggccggactggtaacgttaatcgttatcgaacttgttctcggcattgataacctggtctttattgccatcctcgctgaaaaactaccgccggggcagcgcgaccgcgcgcgcattaccggcctgatactggcgatgatcatgcgcctgctgctgctggcgtcaatctcgtggctggtcaccttgactaagccgctttttagcgtacaggcgttaagctttagcgcccgcgatctgattatgctgttcggcggcttcttcctgctctttaaagccaccatggagctcaacgaacggctggaagggaaagatagcgccaaccctacccagcgtaagggggcgaaattctgggcggtggtcgcgcaaatcgtggtgctggacgctatcttttctctcgactccgtgattaccgccgtggggatggtcgatcacctggcggtcatgatggcggccgtgataatcgccattagcctgatgctgctcgccagcaagtcactgacccgatttgtgaacaaccatcccaccattgtcattttgtgtcttagcttcctgctaatgatcggctttagcctggtggcggaagggtttggtttccacattccgaaagggtatctgtacgcggctatcggcttctcggtgatgatcgaggcgctcaaccaactggctatttttaaccgccgccgttttctttccgctaaccatacgctgcgccagcgcacaacggaggccgtgatgcggctgattagcggtaaaaaagaggatgccgaactggatgcggaaaccgccgcgatgctggcagaccatgacgacagccagatttttaatccgcaggagcgcaggatgattgagcgggtgctgaatctcaaccagcgcaccgtaagtagcatcatgacgtcgcgtcacgatatcgagcatatcgatctcaacgcgccggaagcggaaatccgcgctctgctggaaaagaaccagcatacgcgtctggtcgtgacgggtgaaaatgaacaggaagatttactcggcgtcgtccacgtcatcgatctgttgcaacaatcgctgcgcggcgaaccgctcaacctgcgggcgctgattcgccaaccgctggttttcccggaaacattgccgctgctgcctgcgctggagcagttccgtaacgccagaacccattttgcctttgtcgtagatgagtttggctcggttgaaggcattgtgacattaagcgatgtcatggagactattgccggtaatctgccgaatgaagtcgaggaaattgacgcccgccacgatattcagaagaacccggacggttcctggacagcaaacggccatatgccgctggaggatttggtgcagtacgtgccgctaccgctggatgaaaaacgggaataccatacgattgccggattattgatggaatatttgcaacgcataccgcaaaccggtgaagaggttcaggtgggcgattatttgctgaaaacattgcaggtagaaagccatcgagtgcagaaagtgcagttaattccgctgcataacggcgagccagaccaggagatgtaacgtctgttcgcctgccccggcctgcttaccaggcaggccggaggcgcgttagcctcgccatccggctctgccctttggccaaaaactacagcttattcagcagcttcttcacatctttaccgttgcgggtatctttattgcgatccgcccagtcattgagccgacgcttcgcctcatcctgtaaatgcttacgcaataactgatccacttgcagggtatagttcagctcctgccacttgccatagacgcgcaacggcaccggcgtctctttcaggaaggtgatcaggttgctatcgccgttccagccgcccagcacacgcagattaaattgtgtatcacagctctgcttaaccagatccagcgttccgctgccggttaacgccagcatagaagattgcccgaccatgtcgtcgagcgtcagcgtgcccttatttagcgtcagatcggtcgtgaagcgatccagtcgggtcgcgttgtccatattttcctgcgactgctgcgcgtcgccgccgcttcgctctacggcctgctgcaccagttgctggaaattcattccttcaaggcgcgtattgctcatgtcaacatgcgcttttcctttccagctatggcgaaatgcctctgcgtcaatatccgccccggagaaatcgccaaccagcgacatcttaccggtcaggctaatcggataattgaaggctttcaggatagtcccaatctcaacatggttgaggcgagggtggaattcgatgcgcggactggcggtgcgggcgtccagcgtgccgggcagcgacatctctccgtcggccagtttcccctgcaaatcagtaatatccagcaatccggcctgattagacatcttcgtcgaaacctgggtaaagtccattccccgccagcgaactgaatccgcctgtaaagcaatctccgccgtaaagctttgcagcccctgataaggcggcgcaccaacacgcgacgcgataactggcctggtcagggggagcgtattttgcccctgcgacaccgcgccgcctgtctgagccacggcgctatgatgcggcaacaggttgtccagattaagcttgctggactggaggtcaatttgccattccggctgctccgccagcgttacctgaacttgcccggtcagagaactgtcattcgccgttaaatttaagtggttaaatgaaagacgtttttgcgcctcctgccactgcgcctgcaattgtccctgcccctcaatcccctgcgctggtagatccgcgccctgcaattgccagcgcagttgctcaatacccgcggttaaattatgcgggtaatcggaagcatccaccgttccgctgaacgataaagcaagatcccgctgatcgcggttcacgcgtcccgaaaaatcaaacgtgccgcgatgctcggcatcttgttccatattcagacgaatatcgcgcaccgtgacctgatcatcattttcatgctggaaaaccagcacgctgtcggcaacgcgcaggctacgaatatcaaacgaccagccgcgatcttccgctacgtccggcaaggtattatctttcggcgcgaccggcgcatcatcgctgcgtaccgcttccgtttgcggcgtcagttgaatcaccccgcctttcagcatcacctgcttaacatgaagctgatgactcaatagcggccataaagcaacatccaggcgcatattgtcagcccgcaccagcggttcgctggcgcctcgcgccgttagcgtcattcgcccggaaaggatactcagttgcggccatacgtgccagcgcagcggcccgtcaagttgcaactgatattcactacgcgcggcaacctgctgcaccatataggcgcggaaatcattcggattgaccaacaataccaacgcagagaatccggccaccagcacgaccaggagaatcatcagcgtcgtcagaaatcgtctcatgctaccctcaatggaccggcagtattgcgccgaatggctcagtctttatcaatccggctggcgacagcgccctgctgatcgcgatatttggcatcctgacggcggttataaggccgcgccgccgggccggacagcggctcaaaactcagcgcgccgatgagcatacccggacgcaacgccagcggcagcttcccggagttgtaaaactcaagcacaatgcagcccgaccagccgggatcgatacggtgcgccgtcacatgcaccatcagccccagacgcgccagcgaggagcgaccatccagccagcccactaaatccggcggcagggtaacggattcaaaggtaacggccagcgccaactcgcccggatgcagataaaatgcctcgccgtccggcaaaacgatttcatcgctcatcacgcgatccagcgccgcgctgacctcatctttaggcccgctcagatcgataaacgccgccgtatggccacggaaggttcgaaatttattgccaagacgtacatcgaccgtcgcgccgttaatgcgctctacgggaggtcgcggggtgatagacaaacggccttcatccagccaggcttcaatatctcggtcgcataaacgcatggcactttctcctttcgcgcatcaagcccttaaatcaagcacatcaagggctaaccaggttatcactgaacggtacacaattcgccagatttattcaaagaactggctgattttcgctttcagaatatcaatagcgatgcggtttttaccgccgcgcggcacgataatatccgcatattgtttggaaggctcaataaattgcaggaacatcggacgcaccgttttctgatattgcgccatcaccgaatccattgagcgaccacgctcgttcacatcgcgtttgatacggcgcatcaaacagatatccagcggcgtatcgacaaaaatagagaagttcatctcttcacgcaaacgcgcgtcggtcagtaacagaataccttcaagaataatcactttcttcggttctacgcgaaccgtttcctgcatacgggtatgctcaacataactgtataccggtaattcaatcgccgaaccgcgcttgagcgcctgaagatgctgaaatagcaggctgtgatccatcgcattcggatggtcatagttagtttttacgcgttcttccatcgacagatggctttgatctttgtaataactgtcttcgggaataacgccaatatgttcgtcacccacttgttcacgcaattcgcggtaaagggtactggcaataagactcttgccggaagccgatgcgccagcgataccgataatgacgcactgatgagactgatcagtcataaatttagcgacctgattaacctggatgtaaggaaggggggcgccgaaacgccaaacgcggcaattatagggatttcagcagcgcgataccagtccggcgctatgccacggtgaatttgttggcggcgcattcgacgtcgcgacgtaaaagcgttcagttttaacgcgggcagcggttttatcgacccgtctggaggaggaatacgccgggagccacaatttatattcagccagcgtataaatcattacgcgtttatactagcataatcacagagtaaactgacgcgtccggtattccgcgacgttaccggcgattcggatagagtggtaatgagtaaaccatcccaacatgttttcgttaccgtcccccacccgctattgcgtctggtcagtttaggcctggtcgcgtttgtctttacgctcttttcgctcgtattatcgcgtgtcggcacccaactcgcgccgctgtggttccccacctccattatgatggtcgcgttttaccgccatgcgggccgtctgtggccagggatcgcggtcgcctgctcgctcggcagcatcggcgcctcactgactttatttcctgccgcctcgcttaactttagctggacggcaataaatattatcgaggcggccactggcgcgatactgctgcgaaaactgctccccagctacaaccccttacaaaatttgaatgactggtttcgtctggctatcggcagcgccgtgattccgccgctactcggcggcctgttattttggctaatagcgccggaagcggtcgcctcgaaagcgtttctgatttgggtattatcggaagccatcggcgcgctgacgctggtgccgttaggtttactgtttaaaccacactatctgttgcgtcatcgcgacccgcatctgttgctggaaacgctattgacgctggtcattacgctggcgctaagctggctcgctatgcgctatattccgtggccgtttacgtgcgttatcgtcctgttgatgtggagtgcggtgcgcctgccgcgaatggaggcgtttttaatttttttagctaccgttatcgtggtctcgctcatgctggccaatgaccccacgctgctcgccacgccgaaaaccgacgtgatggtcaatatgccgtggctgccttttttaatgatcctgctgcctgccaatatgatgacgatggtgatgtacgcgtttcgcacggagcgtaaacatatcaccgagagcgaatcccgctttcgcaacgcgatggagtattccgccattggtatggcgctggtcggtacggagggtcagtggctacaggtcaataaatctctgagccattttcttggctatagccaggatgaattacgcacgatgacatttcagcaattgacctggccggaagacctgaataacgaccttgaacagctaaacatgctggtgcgcggcgacatcaacagctattccatggaaaaacgctactacacccgcaacggcgatgtcgtctgggcgctgctggccgtctcactggttcgtcataaagacaataaacctctctattttattgctcagattgaagacattaacgatctcaagcaaagcgagcaggaaaaccagcggttgatggagcgtattacacaggcgaacgaggcgctgtttcaggaaaaagaacggttgcacatcacgcttgactctatcggagaagcggtggtgtgtattgatgtcgcgatgaatatcacctttatgaacccgatcgccgagaagatgagcggctggcggcaagaggatgctttaggcacgccattattaacggttctgcgcattacgtcaggtgataaggggccgctgctggaggatatttatcgcgccgacaggtcgcgatcggacatggaacaggagatagtgctccattgtcataacggcggcagctacgatattcattacagtatcacgccgctcagtacgcttgatggcgataagattggttcggttctggttatccaggacgttaccgaatcacgaaaaatgttacgccagctcagctacagcgcaacgcatgacgccctcacccaacttgccaaccgcgccagttttgaaaaacagcttcaacagcgcctgcaaacaatacaggaatcgcctcaacatcatgcgctggtgtttatcgatctggaccgttttaaagcggttaacgacagcgcgggacatgccgccggcgatgccttattgcgtgagctcgcgtcactgatgctcagtatgcttcgatccggcgatctcctggcccgtctgggtggcgatgagtttggcctgttgctgccggattgtaatagtgacagcgcgcgctttatcgcgacgcggcttatcaacgccattaatgagtatcactttatgtgggaaggacgcctgcatcggatcggcgccagcgccgggatcacaatgataaatgaacataactgccagctcacagaggtcgtgtctcaggccgatattgcctgctacgccgcgaaaaatagcggtcgaggccgtctgaccgtgtacgaaccgcagcacgcattaacctcctcaaagggaatgatgccgctggaagaacagtggcatatgattaaaaataaccacctgctgatgcttgccagaaacgtcgcgccgccgcgtacgccggaggccaccagcttttggctggtctcactcaggctgtggaccagcgaaggggaagtgatggaagagcgcgcgttccgggcagggttagccgactccgcgctgcatcacgcgcttgaccgacgggtattccatgagtttttccaccatgcggcgaccgccgtcgccagcaagggattaagcgttgcgctgccgctgtccgccgcgggattatacagcgcgacccttattgatgagctgctggaacaactggagcatagtccactgccgccacggttattacacctgattatcccggctgacgttatcgttaagcaggcgcagaccgccgctgcgactctgcgaaaactgcggcaacgcggctgccaggtgattctcagccatgtcgggcgcgatttacagctgtttaatttactgcccctgcatatcgtcgattatttactgctggatagcgaccttatcgccaacgttcatgaaagtttaatggatgaaatgctgacctcgatcatccagggacacgcccagcatctggacatcaaaacgctcgccgggccggtacaaaacccacaggtgctggatacgctctcccgtattggcgtggatctgatttatggcgacactatcgccgaagcgcaaccgctggatttgttactgaataccagctatttcgctatccattgacggttgccagccgtgggtataccagatatgcagtagcgcgtaggaacgccacggtttccagcgctccgcgtagcgacggatctgcgcgggcgtcatcccggcgaagcgctgcttaattaagtaatcatcgggcaaaaagatatcttttgcctgccaaccgcgcagggcgaaatagttcgccgtccagcggccaattcccggaaacgtttgtaaatttttaacgctctgctcaatatccggcggcgcggcgagcgccagttttcccgccagcgtcgcctgcgccagatgaatcagcgcttcggcgcgccgcagcggcatccccagagctttaagcgccagcggatcggccaacgccagcgtttccggaccgggaaaacagacataatcgggcgcatccggcaacgcctcgccatagcggcgcgccactttcgccgtcaaccttgccgccatcgcgacactcaccagttgccccagtatcgcccgcacgccctgttcaaacgtatcaaccgatcccggtaaacgcagccccggtctgtcctcgcccagtggccccagcacggcggcaacctgcgcgggctggcagtcaagatcaaacagacgcgaaactttcgccagacacgccggcgcgacgggaagtaatccggcgctcacgctaacctgcacagtgtgggtgggcagatggggcctcacgctgaccagtccgcgatgctcgcccaccaccaggctgcgcgcataaaagccctcgcctactgtttccacgccgtccaccgcacgcgcggcaagaaagcccaacatccacgaccagtcgtaaggcggctgccagctcagggtaaacatacttttctcctttatttgacctttcagcataaacgctaatcgcacgtaacgccttgctttcatattccagttgtcgccgcgacgacatttcgctaaagtcacgccccttcttcactggcatggggattttaaggtgtttatcggatttgattacggtacggcaaactgctcggtcgccattatgcgcgacgggcatccacagttgctgacaatggagaataacagcgcattactgccgtctatgctgtgcgcgccgacgcgcgaagcggtgagcgagtggctgtatcgccatcatgatgtgccggcaacggacgaagaaacccaggcgctgctacgccgcgcgatacgctacaaccgcgaggaagatattgaggttggcgcgcaaagcgtacagtttggtctggcgtcgctggcgcactatattgacgatccccaggaggtctggtttgtcaaatcgccgaaatcctttttaggcgccagcggcctgaaaccgcagcaggtcgcgctgtttgaagatttagtctgcgccatgatggtacatattcgtcatacggcgcacagccaattgccggaggccattacccaggcagtgatcggtcgcccgatcaactttcagggactgggcggcgatgacgcgaaccgccaggcgcagggtattctggagcgggcggcaaaacgcgccggttttcaggaggtggtattccagtacgaaccggttgcggcgggcctggactacgaggctacgctgcgggaagagaagcgtgtgctggtcgtggatattggcggcggcaccaccgactgctccatgctgctgatggggccgcagtggcgtcagcgcgccgatcgtgaaaacagcctgttggggcacagcggttgccgcgtgggcggaaacgatctggatatcgcgctggcctttaaaaatctgatgcctttgctgggcatgggcggcgaaaccgaaaaaggtatcgccctgccggtgctgccgtggtggaacgccgtcgcgattaacgacgtcccggcgcaaagcgatttttacagtagcgcgaatggtcgtctgttgaacgatttggttcgcaacgcgcgtgaagcagacaaggtcgcgttgctgctcaaggtctggcgtcagcggcttagctaccgcctggtacgctgcgcggaagagagcaaaatcgccctttccggccaggcggatgttacggcgaggctgccatttatcagcgacgacctggcggtcgctatcagccagcaaggactggaagcggcgctggatcaaccgctgacgcgcattctggaacaggtgcaactggcgctggacagcgcgcaggaaaaaccggatgtcatctatctgaccggcggcagcgcccgttcgccattgattaaaaaagcgctttccgaacagttaccgggcatacccgtcgctggcggcgatgatttcggctccgtcaccgcaggactggcgcgctgggcggaggtcgttttccgctaagcgcctcgcaagcccagcgctgatggattgacattattcttgatgtggcttaacgtcaggagtgagggtaagggaggattcctcctccccctggtgtcttagtaagctggtaggctaatcactaagagtatcaccagtatgatgactaccttcatcataaccctttccttattttggccccttcctcgggaggggctttcccgtttcagcgtcctgctgaaatcggtggcttaccttcattgccgtgccgccactttaccgcactccggcgcgttaacgattttcaccgatgagagttgcgtagcgcctcgcaaagcgggtcgccattcagaataatcccgaccgtgttccataattcctccatttttctcccttccctgctgactacaatagaggaagcaacattccgcaaaacgtttcaggatgagaaacttataccgatgaaaggcagtaatactttccgctgggcaatagcgattggggttgtagtggccgccgccgcattctggttctggcatagccgtagcgaaagcccgaccgccgcgccaggcgtcgccgcgcaagcgccgcataccgcctccgcaggtcgccgcggtatgcgcgacggccctctggcgccggtacaggccgcgaccgcgaccacgcaggccgtaccgcgctatctgagcgggctgggtaccgtgaccgccgcgaataccgttacggtgcgtagccgcgtggatggtcaactcatcgccctgcactttcaggaaggtcagcaggtcaacgcaggcgatctgctggcgcaaatcgatcccagccagtttaaggtcgccctggcgcaggctcagggacagttggcgaaagataacgctacgctggcgaatgcgcgtcgtgatctggcgcgctatcagcaactggcaaaaaccaatctggtttcccgtcaggaactggatgcgcaacaggcgctggtcaacgaaacccagggaaccattaaagcggatgaagctaatgtcgccagcgcgcagttacagctcgactggagtcgtatcacggccccggtctcgggacgcgtgggtctgaaacaggtggatgtcggcaaccagatttccagcagcgataccgcaggtattgtcgtcattacgcaaacgcacccgattgatctcatttttactctgccggaaagcgatatcgcgaccgtagttcaggcacagaaagcggggaaagcgctggtcgtagaagcctgggatcggactaactcgcacaaattgagcgaaggtgtgttgctcagtctggacaaccagattgatcccacgacgggaacgatcaaaattaaagcgcgctttaccaatcaggacgatacgctgttccccaatcaatttgtgaacgcccggatgctggtcgataccgaacaaaatgccgttgtggtgcctgccgcggcggtgcaaatgggcaatgagggccactttgtgtgggtgctgaacgacgaaaataacgtcagcaagaagcgggtaaaaatcggtattcaggataaccgaaacgtggtgatcagcgcaggcttatcggcaggcgatcgcgtcgttaccgatggtattgatcggctgacggaaggcgcaaaagtcgaggtcgttgagccgcaaaccaccgtggcggatgaaaaatccccttcccgccatgaaggtcaaaaaggagcgcgcgcctgatgcaggtattacctccgggcagcacgggcggcccttcgcgtctgtttattctgcgccccgtggccaccactctgctgatggcggcgattttactcgccgggattatcggctatcgcttcctgcccgtcgccgctttgccggaggtcgactaccccactattcaggttgttacgctctaccctggcgccagcccggatgtcatgacctccgccgtcaccgcgccgcttgagcgccagttcggccagatgtcaggactgaagcagatgtcgtcgcaaagctccggcggcgcgtcagtggtaacgctacagtttcagttgacgctgccgctggacgttgccgagcaggaagtacaggcggcgattaacgcagccaccaatttattgccttccgacctgccgaatccgccgatttacagcaaagtcaatccggcggacccgccgattatgacgcttgccgtcacctcaaactcgatgccgatgacccaggtagaggacatggtagaaacccgcgtggcgcagaagatctcacaggtctccggcgtcgggctggtgacgcttgccggcgggcagcgccctgcggtacgcgtaaaactgaatgctcaggctgtcgccgcgctcggtctgaccagcgaaacggtccgtaccgcaattaccggcgccaacgtcaactcggcgaaaggcagtctggatggccccgaacgggcggtgacgctttctgctaacgatcagatgcagtctgccgacgaataccgcaggcttatcatcgcgtatcaaaacggcgcgccggtacggctgggcgatgtcgccaccgtcgaacagggggcggaaaatagctggctcggcgcatgggcgaatcaagcgccggctatcgtgatgaacgttcaacgccagcctggcgccaatatcattgcgacagcggacagcattcgccagatgctgccccagcttaccgaaagcctgccaaaatcggtgaaggtcacggtcctgtccgatcgcaccaccaatattcgcgcttccgtgcgcgatacccagtttgaactgatgctggcgatcgcgctggtcgtcatgattatctatctgtttttacgtaatattcccgccacaattattcccggcgtcgccgtaccgctgtcgcttatcggcacctttgcggtgatggtgtttttggatttttccattaataacctgacgctgatggcgctcactatcgccacgggtttcgtggtggacgatgcgattgtggtgatcgagaacatctcgcgctacatcgaaaaaggagaaaaaccgctggcggcggcgctcaaaggcgcgggtgaaatcggctttaccattatttccctcaccttttcactgattgcggtgctgatcccgttgctctttatgggcgatattgttggtcgactgttccgcgaatttgcggtgacgttggcggtagcgattttaatctccgccgtcgtctctttgacgctcacgcccatgatgtgcgcgcgtatgctcagccagcagtctctgcgtaaacaaaaccgcttttcccgcgcctgcgagcggatgtttgaccgcgtgatcgccagctacggacgtggattagcgaaagtgctcaaccatccgtggcttacattgagcgtggcattcgccacgctcctgctcagcgttatgctgtggatagtcattccgaaagggttctttccggtacaggataacggcattatccagggaacgctgcaggcgccgcaatcgtcatcgtatgccagtatggcgcaacgtcagcgccaggtggcggagcggatattacaggacccggcggtgcaaagcctgacgacttttgttggcgtagacggcgctaaccccacgctgaatagcgcgcgcctgcaaattaacctcaagccgctggatgcgcgtgatgaccgcgtgcagcaggtgatctcccggctgcaaaccgccgtggcgacgattcccggcgtggagctgtatctccagccgacgcaggatttaaccatcgacacgcaggtcagccgcacacagtatcagtttaccctgcaggccacgacgctcgatgcgctcagccactgggtgccaaaactgcagaacgcgctacagtcgttgccacagctctctgaggtaagcagcgactggcaagatcggggattagcggcctgggtgaatgtcgaccgcgacagcgccagccgtctgggtatcagcatggcggatgtggataacgcgctctacaacgcgttcggacaacgcctgatttcaacgatttatacccaggcgaaccagtaccgtgtcgtgctggaacataataccgccagcatgccgggcctggcggcgctggagacgattcgcctgacgagccgcgacggcggcaccgtaccgctcagcgcgattgcccgcattgagcagcgcttcgctccgctctccatcaatcatttagatcagttcccggttacgacattttcgtttaacgtgccggagagctattcgctcggcgatgcggtgcaggcgattctcgatacggaaaaaacgctcgccctgccagcggatattacaacgcagtttcagggtagtacgctcgccttccaggcggcgctaggcagcaccgtctggcttattgtcgccgccgtggtggcgatgtatatcgtgctcggcgtgctgtatgagagttttatccatccgattacgattctctcaacgctgcctacggcgggcgtcggcgcgctgctggcgctgatcatcgctggtagcgagctcgatattatcgccattatcggcattattttgctgatcggcatcgtgaagaaaaacgccatcatgatgattgacttcgccctcgccgccgaacgcgaacaggggatgagtccgcgcgacgctatcttccaggcctgtctgctgcgttttcgaccgattctgatgaccacgctggcggcgttgctcggggcattgccattaatgttgagtaccggcgttggcacggaattacgtcgcccgttggggatcgcgatggtaggcggcttactggtcagccaggtattaactctgtttaccacaccggtgatttatctcctgtttgaccgcctgtcgctgtacgtgaaaagtcgctttccgcgccataaagaggaggcgtagatgcgctttttcgcccttttcatctaccgcccggtcgccaccattttgattgccgccgccattacgctgtgcggcattctgggctttcgtctgctgccggtcgccccgctgccgcaggtcgatttcccggtgattatggttagcgcctcgctgccgggcgcctcgccggaaaccatggcttcgtcggtggcgacgccgttggaacgctctttgggacgcattgcaggcgtcaatgaaatgacctccagcagctcgctcggcagtacacgcattattctcgaatttaatttcgatcgtgatattaacggcgcggcgcgcgacgtgcaggccgccattaacgccgcgcaaagcttgttgccaggcggaatgcccagccgcccgacttatcgcaaggccaacccgtccgacgcgccgattatgattttaacgcttacctcggagagctggtcacagggcaaactgtatgatttcgcctctacccaactggcgcaaaccatcgcgcaaattgacggcgtcggcgatgttgacgtcggcggcagctccctgcccgcagtacgtgtaggcttaaacccgcaggcgctctttaaccagggcgtctcgctggatgaggtccgcgaagcgatcgacagcgccaacgtacgccgaccgcaaggcgcaattgaagatagcgtccaccgctggcaaatccagaccaacgacgaactgaaaaccgccgccgaatatcagccgctgattattcactataacaacggcgcggcggtacgcctgggcgacgtcgccagcgtcaccgactcggtgcaggatgtccgtaacgccgggatgacgaacgctaaacccgctattttgttgatgatccgcaagctgccggaggccaatattattcagacggtcgacggcatccgggcaaaactgccggaactgcgggcaatgatccccgccgctatcgatttacaaatcgcccaagatcgttcgccgacgattcgcgcatcgctgcaagaggtagaagagacactggctatctctgttgcgctggtgatcctggtggtgtttttattcctgcgctccgggcgcgccacgctaattcccgccgtcgccgttcccgtttcgctcatcggcaccttcgccgccatgtatctgtgcggcttcagcctcaacaatctgtcgctgatggcgctgactatcgcgaccggatttgtcgttgatgatgccattgtggtgctggaaaatatcgcccgccatctggaggcgggaatgaaacctttgcaggcggcattacagggtacgcgagaagttgggtttacggtcatctccatgagtctgtcgctggtggcggtatttctgccgctgctgttaatgggcggcctgccaggacgattattacgggaattcgccgttaccctctcggtggcgattggcatttcgctggtggtctcgctcacgctgacgccgatgatgtgcggctggatgcttaaatcaagcaaaccgcgcacccaaccgcgtaaacggggcgttggccgtctgctggtcgccttgcaacagggttacggcacgtcattaaaatgggtgcttaaccatacgcgtcttgtcggtgtggtttttcttggcaccgttgcgctgaacatctggctttatatcgccatccctaaaacattctttccggagcaggacaccggcgtgttgatgggcggtattcaggctgaccaaagcatctctttccaggccatgcgcggcaagctgcaggattttatgaaaattattcgcgacgatccggcggtgaataatgtcactggttttaccggcggatcgagggtgaatagcggcatgatgtttattacgctgaagccgcgcggcgaacgcaaagagacggcgcagcaaatcattgatcgactgcgggtcaaactggcaaaagaacctggcgccaggctgtttctgatggcggtacaggatattcgcgtcggcgggcggcaggctaacgccagttaccaatatacgttgctgtctgactctctggcggcgctgcgcgaatgggagccgaaaatacgcaaagcgctctcggccctgccgcaactggcggacgtaaactccgaccagcaggataacggcgcggagatgaaccttatctacgaccgcgacaccatgtcacggctgggtattgatgttcaggccgcaaacagtctgttaaataatgctttcggccagcggcaaattaccaccatttatcagccgatgaaccagtataaagtggtgatggaagtcgatccgcgctatagccaggatatcagcgcgctggagaaaatgttcgttatcaaccgtgacggaaaagcgattcccctctcttatttcgcccaatggcggcccgccaatgcgccgctgtcggtgaaccatcagggactttccgcggcgtccacgattgcctttaacctgccgaccggcacatcgttatcgcaggcgacagaggccattaatcgcaccatgacgcagcttggcgtcccctcgacggtacgcggcagtttttccggaacggcgcaagtcttccagcagaccatgaattcacagcttattttgatagtggcggcgatcgctaccgtctacattgtgctggggatactgtacgaaagctacgtccatccactgaccattctctctactctgccatcggcgggcgttggggcgcttctggcgctggaactcttcaatgcccctttcagcctaatcgccctgatagggatcatgctattaattggcattgtgaagaaaaacgccattatgatggtcgattttgcgcttgaagcgcaacgaagcggcggcctgacgccggaacaagccattttccaggcctgcttgttacgcttccgtccaataatgatgaccacgctggcggcgctgttcggcgcactgccattggtgttatctggcggagacggttcggaattacggcagccgctggggataaccattgtcggcggtttggtcatgagccagctcctgacgctctataccacgccggtggtgtacctctttttcgatcgtctgcggctacgtttttcgcgtaaaaatagcaaaccggtagtagagatatgacagaacttcctgacaacacccgctggcaactctggattgtggcattcggcttttttatgcagtcgctggataccaccatcgtcaacactgcgctgccctccatggcgaaaagcctgggggaaagcccgctgcatatgcacatggtagtggtgtcatatgttcttaccgtcgccgtaatgctccccgccagcggctggctggcagataaaatcggcgtgcgtaatatcttctttgccgccattgtgctgttcacgctgggttcgctgttttgcgccctctccggcacgcttaatcaactggtattagcgcgggttttacaaggcgtaggcggcgcgatgatggtgccggtcggacgcctgacggtcatgaaaatcgtgccgcgcgcgcaatatatggcggcgatgaccttcgtcaccctaccgggacagatcgggccgttactcggccccgcgctgggcggggtgctggtggaatatgcttcatggcactggatctttctgatcaatatcccggtgggaattgtcggcgctatggcgacctttatgctgatgccaaactacatcatagagacccggcgctttgatctgccggggttcctgctgttagctatcggcatggcggtactcacgctggcgctggacggtagtaaaagcatggggatttcgccctggacattagccggacttgctgcgggtggcgcggcagccattctgctctatctcttccatgccaaaaaaaactcaggcgcgttattcagcctgcgattgttccgcacgcccacgttttcactagggttgctgggcagttttgccgggcgtatcggcagcggtatgctgccgtttatgacgccggtctttttgcaaattggtcttggtttttcaccgtttcatgccggtttgatgatgatccccatggtgctgggcagcatgggaatgaagcggattgtggtgcagatagttaaccgttttggctatcgtcgggttctggtagcgaccacgctcggactggcattggttagcctgttgtttatgtcggtcgcgctgctcggctggtattatctcctgccgctggtactgcttttgcagggaatggtgaactcggcgcgcttttcttccatgaacaccttaacgctaaaagaccttcccgatacgctggccagcagcggcaatagcttattatcgatgattatgcagctctcgatgagtatcggcgtcactattgccgggatgctgctgggtatgtttggccaacagcatatcgggatagacagtagcgccacacatcacgtctttatgtacacctggttatgtatggcggttattatcgcgctaccggcgataatttttgcccgcgtgccgaacgatacacagcaaaacatggtcatttcacggcgtaaaaggagcctgtaatgaaagtctggcggcccggaatcaccggcaagctgtttctggcgatcttcgccacctgcatcgtgctgctgatcagtatgcattgggccgtgcgcgtcagttttgaacgcggatttattgactatatcaaacacggcaacgagcagcggctacaaatgctgggcgatgcgctgggcgaccagtaccagcaacacggcaactggcgttttttacgcaacaacgatcgcttcgttttccagattttgcgttcatttgagcatgacaacgaccgcgataaacccggccccggtatgccgccgcacggttggcgcacccaattctgggtcgtcgatcaaaatggccgggtgctggtcggcccacgcggtccggtgccgcatgacggtactcgccgtcccattctggtcaatgacgtcgaagtcggcgcgattatcgcctctcctgtcgagcggctgacgcgcaatacggatattaattttgatatgcagcagcggcgcgccagttggatgatcgtggcgttatcaacgttgctggccgcgctggcgacatttttgctggcgcgtggcctgctcgccccggtcaaacggttggtcgaaggtacgcacagactggcggcgggggattttaccacgcgcgtgactccaaccagcgctgatgagctgggaaaactggcgcaggactttaaccagcttgccagcacgctggaaaaaaaccagcagatgcgccgcgactttatggcggatatttcccacgaactgcgcacgccgctggcggtattgcgcggcgaacttgaagccattcaggatggcgttcgccagttcacgccagaatcggttacctcgctacaggcggaagtcggtacgcttaccaaactggttgacgacctgcatcagctgtcgttgtctgacgagggcgcgctggcttaccaaaaaacgaccgtcgatcttgttcccctgttggaagtcgctggcggcgcgttcagagagcgctttaccagccgggggctaacgctacattacgcgttgccggatagtatgaccgtcttcggcgacccggatcgcctgatgcaactgtttaataatctactggaaaacagtctgcgctacaccgacagcggcggcggcctgcatatttccgccgaacaacgcgacaaatcattattcctgacctttgccgattctgcaccgggcgtcagcgatgaacagttacaaaagctttttgaccgtttttaccgcacggaagtgtcccgtaaccgcgccagcggcggttctggactggggctggcaatatgcgtcaatattgtacacgcgcataacggtcatcttcacgccgctcattcgccttttggcggggttagcattacagtagagttaccgctggatcgcgatttacagagagaagtatgactgaattacccattgatgaaaacacgccgcgcattttgattgttgaagatgaacccaagctgggacagctgcttattgactacttacgcgcggcgagttacgcccccacgctcatcaatcatggcgacaaggtactgccgtatgtgcgtcaaacgccgccggatctgatcctgctggatctgatgctgccgggtaccgatggtctgacgctatgccgggagattcgccgtttttccgacatccccattgtgatggtcacggccaaaatcgaagagatcgaccggctgcttgggctggaaatcggcgccgatgattatatctgtaagccttacagcccgcgcgaagtcgtggcccgcgtgaaaaccattttgcgccgctgtaaaccgcagcgcgaactccagcagcaggatgccgaaagcccgttaatgattgatgaaagccgctttcaggcctcctggtgtggtaaagcgctggatttaacccccgctgaattccgtctgctaaaaaccttatcgcttgaaccgggtaaagttttttcccgcgagcagttgttaaaccacctctacgacgactaccgtgtggtgaccgaccgtaccatcgacagccatattaaaaacctgcgccgtaaactggaatcgctggatgccgaacagtcatttatacgcgcggtctacggggtgggatatcgctgggaagcggatgcgtgtcgcctggtataatgattattggcataacaataacaaggtcgtaagacgatattttccgccaacgctattctggcggaattaacacactgccctctttcctttggccgagcggtatcccgaaaaccacgacgaacgcgatcggggacaataaattatttggccgctctttttagtttaccgatatactgtgagtagttttttaaacttattgcgcattaattcattaagtgaatctaaaaatacataaacataataccagcttaattatacatggatttttatgacagaaacgtcatctcaccgctataaaccacgcaatataataaatgcgccaaatgtaaaatcgtctattttttcccggagccaacaacgcggcgacagcgaaattatccagcgctggttaagcaaccatttttatcgttggatcattggtgactttcctcatgtttatcctgtgcgctccgtcgccgattatgccgtttattttagcgctgatgcagaaatccccgcctggctggcgccaaagctgggtggcgatgagcgcttttactaccttaacgttcagcacccgcaacttgtggcgatggaaagagatttagtggaatttctttcgcgtcaggaaggaacgcggctggaaactaaactacagcgtatcaactgctttaccgtgctggcaatgcgcgaagcggagcatcaaaaaatgcagcgcctgcgtgaacaaggttggtatccctccaacagcgaggcgctaaaaccggtgatgacggtgaataacggcgtactggttgagcttgatgcaacaaaccccggcctgcgcagtgagatggcgtatgaatcctggcatatgcaacactgcgtcggagattttgataataaaggcgcgctttccggcggctacggcgattactacgcccggcaaattgaacaacagaaacttcgcctgttcagcctgcgcgacggcaataatattccccacgttacaataagcctggtggttggtaataacggcctgagcattgatcagattaaaggtaagcaaaatcgccatcctattaagaaatatgctaacgatgttttatctctgttacgccatctgcaaccacttcctgagcgccacgctgattgcgaagggatgggaatagtttatgaattgacgccggaatattcaggttggaaatttattacgcatattcatgacctcaattttctgctcaatgtgctgcatgacaattttcacttaatggaacacttccccactcccccggtagctttacagtggctgctgctgcacagcgccccggaggcgctgcgctaccttcaggttgttgatcctaacgtggcgacggctgcggaaatgctgtttccgcagcatgaatggcatcctacgcttgccgggaaaaacaccagtagcgaacctttcgaaattgaaagcctgacgctacaaaccacgcgctacctccctgtcatcaaggaggtgcaataatgttctggattgttcttattattgccgccctattttttagctggcgcaactacaaaaaaaacaaaccgctgattgcagcccgtatcgccgaggagaaagaaaaagatcgcctgaaagacctgcgtcgcgatacccgacggcggcaatgggcgctggcgctagctgatatcctcgcccggcgcaacgggctaccgatcaaaggcgttgagctggtatttaaacttgacgatgacaaacgccgctatctggcgcagcaggtaaaaaaagagctgggcttgagcgaaaacctcgacggcgcggcgttacgccacaaggtcgaggatatcttacgccgctggcctgcgggcatcggcagctcgccgcgcacgttttatcatcatctggcggcccagggccaggtccgcgacgcgctggctttcgactgcatgcgcaccgcctttctgacccgctgtatcgccgggctcggctggtgcgacgtacatcaggcctggctggtgttattacttaacgcccagcgcgctcaggactgttttgattcctgggaggattacgccaccgcctacgttcgcgcccgccgggtatggctcacgctacgtgacacgccaacagcgcttgccggacgggatttacaggaagccacccattatctgcaagaccctgtcagccgctggcgacaactgccgtggaatgaattcaaaattttcgagccgatttaaaggacgctttatggaacaggatgatcgtctgctcaacgctatgtttgagatgtgcaaccacaaaaatcccctcaatgacgggcaacgagagtggcatatcgccgatattcccggcctgctgcgcgaagaacgctatgacgaactggacgaacgctacaaccaggcgctgacggagagctttaccagccgcgaagcggaaaagcgctatttcttcgcctggaatcaaatggacaaccctttttacgatatggacacgctggttgaggctgggccgcaaggattagcgctgatcaaaaactggcagcgcgcccgtcctcgctccactcacgcctggcttgccgaggcgcaatactggaatcaccgtgcgtggctttaccgcagctatggctgggcgagagaaaccacccgagcgatgtggatctgcgccgccgcctgcaacgaacggatggtcatcgccgcgctcaatgccatcgactgtgaaccgcgccagtggatggcggcggccctgaccagcaccaactcaaaagtcttcggccagcccgagtggctggttgagttcctcgtgggcgcggatgttgccgggcagccattaatggaagatctggctgaatatcatcgccattcaccgcaggaggtggacgcgctgatggcccattccgggttgtcgtttaccgacgcggtttgcccaaatttgccgcgcccgtccgtgctgccggagtgcaatgacgatgccgggcaaaaatactggctctccgtctgcctggctattttcccgacggcattttacgtgctggatgaatatatcccgtttcgtatgccacgctggagagggtctcacgaggaaatccgcgaatttctggaatcaagcgtatgcgatcacctttctgccgcagaacgtgaacatctggagctattgatctggtgggacgatcaccgcgatctgcgcatcaaagaggttgactccccggcagaacaggaacgtattatcgccaaagccgaagagattagcctgcgagcgcatatccaggaatctcgccacaacgcgctggagtggctgcgggtctgctatagcgatctggacgataatgacgcgctctggcgaacccttcagcgttcgatcgtggaaaaagttaagctcaacaattacttctctgatgacacgataaagttcgccctgcgcgattttcctgacacctggtggatgtataattttctctgtcagaatgcgcagcaaacggaattcgcagtgccgaaaatccgtcgtggctactttcagtacgccgggttattgggtttcgaaaaggatgaggcgcaaggcctcgcctggctcgatagcgtcgccgacattcaatataaccataactggcgggcggcgattaaaaatttcgactggttcgggctcccggaacatttcgtgccgctggcagagctgggcgcacaaagaaatatacccgccgcgctaaacttgctgggccttgaacacaataataaagagaacaacggcctactaccttacgatcctgccatcgcgttagggtattttcagcgcgcggcggagattttgcaccggcagttagcgctgcgcgagagcaccccgtacaaattaatagataacggaggctataccgactatgaaaatgacctgcaaaatattcatttcagcattggcatctgcaaccagcgtctgagtaaacaagaacctgataccgaaaaacgttccgcttatgaaaaagaactactcgataatctctggctggcgcatcagttcgggcataaagaggcctggggcttgttcctgctgaatatttttgaagtgaaggatattacgctggcgcataagcatctggaactggtgcaacaagaggccaacaaaggcacgctacatgctatggtgaccctatcgcgcctgcacggtaataaacacgatcgaacgctgtttaatatgaagctaagcgcacgctgggcgcattttgccttcacactttacccggataatgaaatcgttatggactgcctggaccacctgcatttcgattctttctggaaacgctttcgtttcgcctggtataccgtccgtatcccgaattcagagctgccgggacaggtcaactcaatggtgtaaggtggtttactcccctctcccacggcgctacaatgcccgcccttaaagtgaggactctcctcaagccgcctcatcaggtgaggcggatctgacctgtcatcagaacgagaaaatgatgtttaaaccagaactcctttcgccggcgggaacgctgaaaaatatgcgttacgctttcgcttacggtgccgatgccgtctatgcgggccaaccacgctactctttacgcgtgcgtaataacgaattcaatcacgaaaatttgcagcttggcatcaacgaagcccacgcgctcggaaaaaaattctacgtggtggtgaacatcgccccgcataacgccaagctcaaaacctttatccgtgacctgaaacccgtcgtcgagatgggcccggatgcgctgatcatgtccgatccagggttgattatgctggtacgcgagcacttcccggcaatgccgattcacctgtcggtacaggctaatgccgtaaactgggcgacggtaaaattctggcagcagatgggactgacccgcgtgattctctcccgcgagctgtcgctggaagagattgaggaaattcgccagcaggtgccggatatggaaatagaaattttcgtccacggcgcgctatgcatggcctattccggccgctgcctgctttccggctacatcaataaacgcgatccgaatcagggcacctgcaccaatgcctgccgttgggaatataacgtgcaggaaggaaaagaagacgttgtcggcaacatcgtgcataagcatgaaccgattccggtacagaacgttgagccgacgctcggtatcggcgcgccgacggataaagtgtttatgatagaagaggcccaaagaccgggcgaatacatgaccgcgttcgaagacgagcatggcacctatatcatgaactcaaaagatttgcgcgctatcgcccacgtggagcgcctgacgaaaatgggcgtccactcgctgaaaatcgaaggccgcaccaaatccttttattactgcgcccgtaccgcccaggtctaccgtaaggccatcgacgacgccgccgcgggtaaacccttcgaccctacgctgctggaaacgctggaaggtctggctcatcgcggctataccgaaggtttcctgcgtcgccatacgcacgacgattaccagaattacgagtacgggtactccgtttccgaacgccagcaatttgtcggcgagttcaccggtgagcgtaaaggccaactggcggccgtggcggtgaaaaataaattctccgttggcgatagtctggagctgatgacaccgcagggaaatatcaatttcaccctggaacagatggagaacgccaaaggcgacgctatgccggtggcacctggcgatggctataccgtctggatgcccgtcccgcaggacgttacgctggattacgcactattgatgcgtaatttctcaggcgaatcaacgcgtaacccccatgctaagtagttaattgcggttattttttcatggcgggaagattcttagaaattgatcacataccgcttcgctcaatgcgggtattattcaacgcgctgaaaaacataacccataaatgctagctgtaccaggaaccacctccttggcctgcgtaatctcccttacgcaggcttattttttgcgtataatccataaaaaagtggtacttcccgccatatccaaaattgaccacactaaccaaagcgcaaatgggcgcttaggtttagagacctcccctatccattgccagccagcaagtcacaatcctccccgcatccggtcggactcaggacttagcattgtgacgttaacgtttaaaatcagtgaattaaatcaataactactttgtgagcacttacacaaaaagtttccaggttattaaattaaggttaaaaactgataatttaagcgtgtaaaaatatggcacgttttaatgccgcttttacaaggattaaaataatgttttcccggattagaggtttgatttcatgtcaaagtaatactcaaaccatcgcacctacgctcagtccaccttcatcaggccatgtaagttttgctgggattgattatcctctattgccactaaatcaccaaacgccgctcgtttttcagtggtttgaacgcaatccagatagatttggtcaaaacgaaattcccattatcaatacgcagaaaaacccttatcttaataatattatcaatgctgctataatagaaaaagaaagaattatcggtattttcgttgatggcgattttagcaagggacaaagaaaagcattgggaaaattggaacaaaattatagaaacataaaggttatttacaattctgaccttaattatagcatgtatgataaaaagttaacgacgatttatttagaaaacatcaccaaactggaagctcagtcagcaagtgaacgagatgaggtcttgcttaacggggtaaaaaaaagcctggaagatgtcttgaaaaacaatccggaggaaacgcttatttcatctcataataaagacaaaggtcacttatggtttgacttctacagaaatcttttcctgctaaaaggaagcgatgcctttctggaagctggtaaacctggttgtcatcatctgcaaccaggcggtgggtgcatatatcttgatgcagatatgttacttactgataaactcggtactttgtatttacctgatggtatcgctatccatgtaagtcgtaaagataatcatgttagccttgaaaatgggattattgctgttaaccgcagcgagcatccagcattaataaaaggactcgaaattatgcacagtaaaccttatggcgatccctataatgactggctcagtaaagggttgaggcattattttgacggttctcatatacaagattatgacgcattttgcgatttcattgaatttaaacacgaaaatatcattatgaacacaagcagtttaactgccagttcttggaggtaatcatgatagccttgttttactcacccttcccaccgtcacgtataatcggtatccagagttattcctttatcctgtaaaatgtgatacagattctccattgatctaataactacctcaatttcacattcaagtttctctacagaactttcattgagtgagaagttgagagccagtaataatgattgtgagttattatcataacacaaatgtggtccattattctctgcaaaccataaattagcattgagaaattcaaaagcaagattattattatccggaggttttccgcaaaaaccgtatatcattatatactcactgttagtgcttgttagtaagatacggtaacggttatctataataaatgagcataatctgttttcgtcaaagacaattgaatcggtatttaattttagtgaaaactgtcttaataagcgatcggctcttgaatacataacaccccatactctatctaaagcgtttctatataagtcataagcctctggtctggacgattaacaccccgtgtcatcgtcggaattcgtcttttccctatgacttgctgtgtttgctcatttatggccaggctggccgggttctgatgccatttgcgctaaggtatagtccggcgcatattcccatcataccaattccccccatgccaaacgatgcgcctaaaaccgtcagagcggtagtatatgccgcaccactactgacactggcgacagcccctgagcataccccactgaaaacacttgtaaacaatgccgtggttcccaggcacattaaacatctgggtttattgccgtaagcgttaaaatcaacgatttcagctaccggtttttcgtcattaccccgttcagaaggagggagcaatggcgtttgcgcattcacgcctgaagtgacattcatataaacctcttcatgcacatgcctgtttatgtttatgagaaaagcgatacatcaggcaacggtacgactataggacaccgcgctaagccatcatctaaataggttttatttgatatatagtagcgtgcttctaatagtgcgccgtgtttctgctaaagagtctaaagaacatttcgattttatgctattaaaaagtatgtttggtaataaatatcaggtttttatctgatattatggtgtttgaaattaatactgataactgacgtatgttcgtcttgttaattctccgtttcgttatcaaaggcgctatatcggaaagcgtctgactaccccttgtgatttccttgcactctcacaagcgctactcaatgcgcataccggcatctctcttgtcgccatttgccttaaaccatgcttcgcttaccgctgcgtacagcaggaagaaaaacggtaaagcaataagtgcgcaacatttcaattttcatcctgttctgacctcgctttttcatttctgctatacactttctggagattgttgttcaacctattaaggcataacggatggctaactttcccgccagcttactgatcctcaatggcaaaagcgctgataaccagccgctacgtgaggccattactctacttcgcgacgaaggcatacagattcacgttcgggtaacctgggaaaaaggcgacgcgcagcgttacgttgatgaagcccgtagactgggcgttgaaacggtgattgccggcggcggagacggtaccattaatgaagtgtcgaccgcgctcatccagatccgcgacggcgtagcccctgcactgggccttttgccgctcggcaccgccaacgattttgccaccagcgccggtattcctgaagcgctggacaaagcgctgaaactggcgattgccggaaacgcgatggaaattgatatggccatggtcaatgataaaacctgttttatcaatatggcgacgggcggttttggcacccgcattaccaccgaaacgccggaaaaacttaaagccgcattgggcggcgtctcctatcttatccacggtctgatgagaatggatacgctgacccctgatcgctgcgaaatacgtggcgaaaactttcactggcagggcgatgcgctggtgatcggcattggcaatggtcgtcaggctggcggcgggcagcaattatgtcccaccgcgctgattaacgacggactgttacagctacggatttttaccggcgaagagctgttgccggcgctgttttccacgctcacgcagtcagatgacaatccgaatattattgacggcgcctcagcgtggtttgatattcatgcaccgcatgaaatcacgtttaatctggatggcgaaccactcagcgggcaagaatttcatattgaggtgctgcctggcgcattacgctgtcggctgccgccggactgcccgttgctacgttaataacacctgtcgctggccggatgcgctcacatccggcttttcttcgttgaactcaggcgatggtgactttgctatccagatagacatcttgtacggcgttaatcaacttcacgccatcagccatcgatttcttaaaggctttacgtcccagaattagccccattccaccggctcgtttgttgatcaccgcggtacgaaccgcgtcgccgaggtcagtgtcgccgccgtccgcgccgccggagttgataagcccggcgcgtcccatatagcagttcgccaactggtaacgtaccaaatcgatcgggttatcgctggtcagtttgctgtacacgcggtcatcggtatagccgaagttgactgctttataaccgccattattctcggccattttctgtttcacaatatccgcgccaatcgtagcggccagatggttggcttgccccgtcaggtcagcggatacatggtaatcaacgccgtcttttttaaaggaagaattacgcaggtaagcccacaatacggtcaccatacccagctcatgcgcacgctcaaaagctgcggagatctcttcaatctggcgacgagactgttccgaaccgaaatagatcgtcgcgcctaccgccacggcacccatattgaacgcctgctcaacgctggcgtacagggtctgatcgtactctgtcggatagctcaatgtttcgttgtgattcagtttgaccaaaaacggaatacggtgcgcatagcgccgtgaaaccgaggccagtacgccgtaggtagaggccacgcagttacagccggcctcaatcgccaattcaacaatgttttttgggtcaaagtagcgcgggttagccgcaaaagaggcgccggcggagtgctccaccccctgatcgacgggcagtatcgaaaggtatcctgttcccgccaggcgtccagtattatagagcgtctgcatattacgcagaacggctggtggacgattattgtcaatcatcacccggtcaacataatccttgccgggtagataaagctgatcggaaggaatggtcatacaacgatgctgtaaaaggctgtcggcgtctttgccaagcaactgcgcaatatcagtcatagctatgctcccgtaagttccgatagggtatcggaaggtgaatagtcctgccccgcagattgcgggtcgcaataagcctggtactgaccgaccatttttgccaactttagcgcattttttcggcgctatctgctgactcgattcacgtccgaaaaagtgttagatcggtcaaaattaatgctcaatggtatttaaaaggtattattaaatggtattgtcatggcgtaccttacctgtcatgaaggattcaaaaatgaaaacgacctttaaactgtcgttcatgatgttcgtggagtggtttatctggggcgcctggttcgtccccctgtggctatggctaaataaaagcgggttttccgccggtgaaataggctggtcttatgcctgtaccgccattgcggcgatcctgtcgccgattctggtcggctccgttaccgaccgttttttctcagcgcaaaaagtcctggcggtactgatgtttgcaggcgccgtgctgatgtatttcgcggcgcagcaaaccaccttcgccggattctttccgctgcttctggcctattcattgacctatatgccgaccatcgcgctgacaaacagcattgccttcgctaacgtaccggacgttgaacgcgattttccacgcattcgcgttatgggaaccattgggtggattgcctccggcctcgcctgtggattcctgccgcaaatgttaggctataacgatatttcccccaccaacattccactgctcataaccgccgcaagttcagcgttgctgggcgtatttgcgttctgtctgccagacacgccgccaaaaagcaccggcaagatggatattaaagtgatgctggggctggatgcgctggtcctgctgcgcgataaaaactttctcgttttcttcttctgttcctttctgtttgcgatgccgctggccttctactacatcttcgctaacggctatctgacagaagtaggaatgaagaacgccaccggctggatgacgctcggccagttctctgaaatcttctttatgctggcgctgccctttttcactaagcgctttggtattaaaaaggtattattgcttggtcttattaccgccgcgatccgctacggcttttttgtctatggcggcgcggagacgtacttcacttacgccctgctgttcctcggtattttgctgcacggcgtaagttacgatttctactacgtcaccgcctacatttatgtcgataaaaaagcgccggttcatatgcgtaccgctgcgcaagggcttatcaccctctgctgtcagggattcggcagcctgctgggctatcgtctcggcggcgtgatgatggaaaaaatgtttgcttatccgcaaccggttaacggtctgacattcaactgggcgggcatgtggacgtttggcgcagtgatgattgccgtcatcgcgctactgtttatgattttctttcgcgaatcggacaaagagatcactgctattgacgatcgcgatattgcgttgacacaaggggaagtaaaatgaaagcagaacgtattctcggtgctctttacgggcaagcgttaggggatgcgatgggaatgccctctgagctgtggccgagaacgcgcgtcaaagcgcatttcggctggattgaccgctttctgcccgggccaaaagaaaataatgccgcctgctattttaaccgcgcggagtttacggatgataccgcaatggcgctctgcctggccgacgcgctactcgaatgcgaaggcaacattgatcccgagattattgggcgtaacatcctcgcctgggcggaacgctttgatgcgttcaataaaaatgtactcggcccgacgtcaaaaatagcgctgaatgcgattcgcgacggcaaacccatcgcggcgctggaaaataacggcgtgactaacggcgcggccatgcgcgtttcgccgttgggctgcctgttgccgccaactaacctgacagcctttatagcagaagtggcgttagcctccagcccgacgcataaatccgatctggcggtggctggcgccgtggttgtcgcctgggccgtctcacgagcggttaacggcgacacgtggcaaagtattgccgactcgctccccgccgtcgcccatcaggcgcagacagcgcgtattaccacgtttagcgcctcgctatcggcacgtctggaactggcgctaaacattgtccgccatgccgacggcgtcgaatctgccagcgaacagctctatcagatcatcggcgcgggaaccagcaccattgaatcggttccctgcgctatcgccatggtggaactggcgaataccgatcctaaccgctgtgccgtgctgtgcgctaacctcggcggcgataccgacactatcggcgcgatggccaccgccatttgcggcgcgttgcacggggtaagcgccattaacccccagttaaagcaaacgctggacgaggttaatcagctggattttgcgcgctatgccgttgcgctggcgagttatcgtcaacggcgggaggcactatgaacggcgcacggttgctgacattattaccgaccctgcatacccggcgtccgctcaccgttatcggcgcggcagtgatcgatatcattgccgacgcctggacgttgccgcgtcgcggaggcgatattgaactgcaacaacagagcgtcaatgtcggcggctgtgcgctgaatattgccgtggcgttgaaacgactggggattgacgccagcaatgcgctgccgctgggccagggcgtgtgggcggagaggattcgccgccgtctggcaaaagagggattatccagcgtgattgacgcggttgaaggagataacggctggtgtctggcgttagtcgaaccggatggcgaacgcacgtttatgtcttttagcggcgtggaaaaccagtggaatgcagactggttgtcgcagctcaggacaccgcggggcagtcttgtctacctgtccggctatcaactggcctcgtcctgtggcgaaccactgatccagtggctggaaaccgtcgacgatgtcacgccttttatcgattttggcccacgaatcggtgatattacagacgatgcaatggcgcgcattatggcctgccggcccatcgtctccctcaatcgccaggaagccatcatcgccgcggaacgcgccggacttgcgaccgatacgcgcactttcggcgaagcatgggtaaaccgcttttccgcgccgctggtggtgcgccacgataaagacggagcgtggtattttagcgcgcaatcttccggcgttgtgccagcgtttccggcaaccgtggtggataccatcggcgcgggcgacagccatgctggcggcgtgctggcaggactggcgtcaggctggtcgctcgcggatgccgtactgctgggaaatgcggtggcgagctgggtggtcgggcatcgcggcggcgactgcgcgcccacgcgcgaggcgctactcctcgcacacaaaaacgtataggtcgctacgacaataactgatgctgtattcaataggccgctgctgctgatcgagcgccacctgcttaatcaccagcaccggcactttaccatccatttgaatatgcgactgaaactcatcatccggcatccgggcgctgacgcgggatcgggtacgctgagggtaaatgtgctggcgacgaaaatagtcatacagagaaataccaatcgcgtcgacatcatgaatcagatgcgcgggcacccaggactcttcaatcgataccgcgtcctcatcaacataacgaatgcgtttgagtaaaaagacgtcgctgcctgcggggatcgccaggtgctgcgcgacctcatccggacaacttaccacgcgtttgttaacccatagcgtatccggttttttgccgcgcaagacaacctgctgagaaaatccccgcgcctctttcagggaatattcaaagatattattgatttgcgtaccgtagccgcgggcgcgcgtgacaacaccctcttcttccagcgcctgcatcgcttttcgtaccgtgatgcgcgagacgccggtaagctggctgagatcgcgttcgccaggcaaaatattaccgtgctcaagaataccgctgcgcacggcatcctttaccgtctgggcgaatttcatgtatagcggcgtattatccgccgctgaaattcgttcattcagttgcgcgatgagccgggtatgcgcttgttccatttatctttcctgacgacgggtctgtaggcagtatactaccaccacgcgtggaaatgatgtaccggaccaatgcccttccccacttccagcgtgtccgcctgcgccagcgccgccgaaagccatgccttcgcctcgtttaccgtctctccccaactgcgatgccggggccgtaacgccgccagcgccgccgacagcgtacagcccgtcccatgcgtatttttggtgttcacacgcggcgcgctaaaacgctgctcgccctcgcgggtaaagagccagtccgggctttgcgcatcctctaaatgcccgcctttcatcaataccgcttcacaccccatcgccagtaacgcccgcccctgcgccagcatctcctgttccgtacgcgcatggggcgcatccagcaacgctgcggcttccggcaaattaggcgtaatcagcgatacctgcggcaacagccggacgcgtaatgtttctatcgcagagggcgagagcagcggatcgccgcttttcgccagcatcaccgtatccagcaccacattacgtacatgatggcgctgtaaccgttccgccacggcctcgacaatatcggtttccgccagcatcccgattttcgtggtatcaatgcgcacatcgctgaacacggaatcaagttgagcggcaacaaagtccggctctatccggtacaccgactgtacgccacaggtattttgcgccaccagcgcagtgatgaccgaacagccatatgcgcccagcgcggaaaaggtcttgagatccgcctggataccggccccgccgctgggatcggtgccggcaatcgtcagcgcgttaattcgttgcattggccgcctccacatccagatgatagagcgcatcaagaaaagccgggatgaagctacccggtccttcgctacgctctgccgcggcctgtccagccagtttcatccagcagcaggccgacgcgacattgtccagcgcggcgcccggtaacgcgcaactggcggcgacgaccgccgacaacgcgcagccggtgcctacaatgcgagtcattaacggatcgccgccgggaatgctcagcgtgcgctgaccattagtgacgtaatctatctctccggtaaccacaacgatgcagtctatctgacgcgccagcgcctgcgccgcaggcagtgcggccaacgccgcctcggtggtatctacgccacgtccgcccagcgccatgccggataacgccaggatttccgaggcgttgccgcgtattgccgccgggcgcagggacaagagatccaggcaaaatcgccgacgaaattccagcgcgcccaccgcgacaggatcaagcgtccacggcgttttggcatcataagcgctttctaccgccgcacgcatcgcgtcagcgcgtgaggcagttaatgttccgacattaatcagcaaggcgttggcgatggcggcaaacggtctggcctcgacaggatcaatcaccatggcgggtgaagcgcccagcgccagcaacgtattggcggtaaacgtttgtacgacgtcattcgtcatacagtgcgtaagcggggagagcgcgcgaaagtgttttaacgtatgcgccgcaagcgtgcggcagtgcaggtcaggctgcatggttcagctcctgcccgcgtgaagaagggacacgagcagtgtcagacttccctacgctggcattatccagatcaggtggtacgggtatttctcagccttcacaaagaagggcaccccgagtcgtcaagccccaccgtgttaagcggggtttcgctattaagcatactgtctgtgccagacaatgtaaatttacagtcagcggcggacgataatttcagcgttatcagatagttctcaaaacctattcggttctggcaaacttgctggcggatatgttgctgcacgacgctttcgtttacactttttacgaaaaggggcgtgagataacaaaatagcgcttgtcagatacgccaccagcagaaatgatacacacgatgttaactgacccgcatatgtggagggtaaaagtatgaaaagtaagttgctgccttgcgcgctgttgcttgcaaccagttttgcatgggccgcccccgcgacaacgggcattgatcaatatgagttaaaaagctttatcgccgacttcacccacttcaagcccggcgataccgttccgcaaatgtaccgcaccgatgagtataatattaaacagtggaaattacgtaatctgcccgcgccagatgccggtactcactggacctatatgggcggcgcgtatgtactgattaacgataccgatggaaaaatcatcaaagcctatgatggcgagattttttatcatcgataaaaaaagccccctcatccagagggggaaatacagccccatgttacttttttattagcccttaatcactctatccccttcaaactgccttttttgttgactgccttcactacccgattcgctctggatctcgcccttttgaaactaccgcataccacattaaaatttattgcagaaagattgtcatcccggtcacttattattgtaagtgaccggaagttcattcacctatcgcgccatatatcttaaatgtttttcatatatattaatcgtatttcacatagatcagcgcagtcgcttttagatcgcctggctttatattgtctcggtcataaacataataactggcgataatagggattgttatcatatcactgttgagcggcgtgcctacttgatccactttccataacgttgaagcattaccctgctctgctgtatttgaaatattcaccgtttttccaccgctctccagtataaatccgacgccattattcacagcaccacgcaacacagaatagctatctggtattaaatcactgctggagagataaaccgtcattttacgcgatgtttgtttagcattaccaaaaagattatcacactggagtcgaatattatccgcggcatttttgttgctgaccttgcctgtgttatataattcagaaagcgcaatattcggtagcgtgatcgtcagatcttcaggtttgcaggttgtctgcttgcgatcgtaggacacaaacagatcaaatgaatataaccctgcacctctaagataactattataatctgcggcacaggcattccaacctcttcctgctagcaggcaccctaaaaaccgcaaaccggccgtaaactgagttgcagaagaagcgcttgttattgataccaccccgttgattaggacactgttcccactaccggcagaaatatttacattcgccccagaggaagcgggttcaaccgttaccgtatagcccgttgtaaacggcattgtgagagtattattatctgcccaggcgatttttaacttcagttttactgtatcattgtataatcccacgatgatatcggaaggatccatacgcgttatcttataagtccctgaacaagttgtatcgttaaaattatggctataagttgcggactgattagggttaatcgtaaaatcctcacgaataattaaattatcctgataagtaatttctcccgtacaggctgcgtatgtttcaggtaaaatcaataacatcacgataaaaagaaagagtttcatttcaccacctcaccactaccgacaaatataaactttactttcatcaaccgttttaccaaaggtgattgaacatgaaagcccctgctctttatctactggtacactgacttcgggcggaatatcattcgttcgaataaatagctgactaccttgtccaacaatgcccacattatgaccatgatgatctactacatcataaccaaaaataagaggcgaaccatcaggacgctgcgctttaataaaccatggtttacgctggtcggtatcaaaattcactagcacgacggcccctcggtacggggcggcaactttacggttaccgcgtaattccgtttcactgctactttgcgacacatcaagcataagatggttttcgcgatatggcgtaaggttgtcataaaccaccgttccttttttattggtggtccgatatttttggccgttaacgtaggctccttcaagtcccggagcctgcataatcgcaaaggtatctgaaagccggctggataaattcaacccgccactccaggctacaaccccaccggaaatacttccgccggtctgagtataattggacgactggctgtaactaccattaagcgttgcaacgggcgtattccaggttaaattcgtccccgcagtggtctcactatcgtgtcgctgatgactaacactcacgccgtaattaaattgatcgcgactgcctgccgtaccggttaaaccaatattgtttgaggtaaatccatcatcatcaaaggtcgtcgagttcgacacattcagatgacgccgcggggtagtaataccgtccccccagtcaaagggaattgaaataaacaggttaaaacgtttatcttcattatgatcctcgtcgtaagtctgactggcggataacgtataattaattttctggaacgtattggaatagcttatttgataatctttactggtgccgctacgtccccagtaatcacgccataatgcactcagtgatactgcgccccatccttctggcaaggattggctcacattagctgaaaacgtatttttacgcccaaaatcgttttgataataatcagcaatatcgtatacatcattcttatcgcgacgatagttatttttattattggcccagacatgatcgttaaatgtgcggtaatcctgtgatgaataccgatacgcagccagaccaaaccgagttaatgtttgggtcaggtatttattataagcaatctgataactctgaccatcaaatacatcgccattatcctgtttactgtgcgctcgcgtagcgtcaagcgaaatggcgccaatccgggtattccaccccgtgccgagggtaaacgcattataatggttcgatagcatcgtaccgccataaagcgtcaacaggttattaaggccatactgataactgatttgtgtaaaatcggcctgattatcggcgccttcaatatgactacggccggcggaaaaatcatacttagagacgccaggctgcaacatgttcggtacggaagcgtaaggcaccagccaggtatttatcgaaccatccgcctcacgcacggtgacatcaagatccgcgccaccgcccgcgagttgcagatccgcaatggaaaaggggccaggaggaacctctttctgataaacaacgaatccgttctgttcgatggttaccaaagcgttagtctgtgcaatcccctgcaccaacggcgtaaaattctgtttcgagtttggcaacatttgcatatcgcgaaacaggcgaacgccggtaaatctcacagaatcaaaaatctctgacgaggtatactgatccccggcgcgtaatgtgccgaggagctcagcgataccgcgctccagatacaatgtgttgcttttccactcaccgctgctgccatcggttttattaaatgtggtatccgcatgcgcttgccagcccaacagattgaaaccgctattgaaccgaacgtaagtactttcactactgccagaattcttatagtcactgtaatactggctggcatagtaagaagtataaaatgcattgatgccgcgatcccagttttcaggcaatacataacccgcctcgacctcatttacataggcctggggaacgctcaaatccagccgaaaaacgccaatattaaaagtatagccaccgcttctcacgacatcttttaacgcaatacaatccgttgctccctgcggttgcagaccatcgcttatcacaccaatatttttcaacaactcagttgaaatacacgtgctaccgggatcatcggcaacaatgatatcgtatttacctcgccattgattgttgacataaatatccaattcgtactgtcccggaattggcttattctcatccagatggaaatttgttattttttgatctctcattccccccaccataaaatgggtatcaaacgtttccgtcgcgatagcctgcgtttgccaggtaaacagagtcaataaaacaagcgaagcgatgggcgtcatccttagcatgatgaactcctgtttattttacattcattttgctactaatatagttaccattatcatcaataatcgttacttcatactggcttgttgacgcatatttcatgttaatattttgcgtcgatagcggtggcagcatgatagtttgatcattaatcttagtatttcctgcttttacatccgtcacggtaatccagtttgcagtatcatttttcatgatgacagctttattactgcgaaataaaccaatcctctgaaaactgtctttggttacggcggcaattcgactggggcgccatattaattttattcgattctgcattgcgaatttaagcacatttttaccggcgttttcctggctgtttggtggaatatcaagcacattcagataaaacagactttctttgttgtccggtaagctattaggcattttcttgattttgatctgctgaccagactcagcggcaacgcgcgccactggcggcgtcagcataaatggcacctgaattttttctggcggtaatgaagtgttaccgtcatcaatccaggactgtaccagcgaagcttgctcgccctgattcaccaattgtacaacgacttctttcttctctgccgggtaaatcacacgcgtaccataaataacaataccagcatgcgcaggcaaaattatggcagataataatactgcagataatattttcatatttacacggccttgcttataaaaaaccggcgacgaacgccgccggttgaataaattagtcagtaacaaccgttaaagtcagtgttgagctaacatcaccagaagcaacatcaccgtctaaacgcgcatagcgtgctaaaaaagtcaggtcgtattcaccgctgctatttggatctagtgtcacccccgtctctggatcaatctgattatccgtacttccgtagtaaaccgcaaaaccgacacctttggcagacccgttattaaatgtgatatcgtggctgtcaaattgcgttgaagagaaggtaatacgcggcgctacaccctgttgacattttattttcaacggcatctgagtttgattagttactgcgtcataaatctgacccggggttaaattaattattttatccgcaccaatttcattcagtctaatttcagcggtgttcgtacccaaaaattgacaggtagtaccaaccacctttccgttaatattcagaacgcctgaatcatactcatcaacagcaaaagccccagcgctcataaatacagcagacaatacagaagcagcaataagtgaacgtttcataatctcttccttaatgaagtaatttctatttgttaagagttattaacccttgcaacgaaaattctcatagacaggaagttatcgcaatgtaaacacgatgttttgttgatttaaaacaatttacagattgcaatataattgcaacaaataatcattgcttatcattattttgtaaacttattaatttccgaaatttactgcccttaaatataaacacaacaaataaaaaagcccatatcattgatatcaatgatatgggcctgcggaattaataagaattagtcgtaatgattaacaacaatctgtcgggtgctatcaccaggcaccgtgtatagctgcgttgtcacacctctcatcggcgtagcggcgggtgtttgcagagttgaaacgtggatagtgttgccgcaacgctgctgcaactgtgcgtttaccacttctgtactgcacgttggcgcggtcacttttccactgatggttaatgttgcggtgtcggaggcaaaaacaggtacgcttatcccataagccgaaactataattcccatcagcaaatattttttcatagtgagtaattgttcctctggtgaacgtcaaacagtatgcaggccgtcctgatgagcagtatgaacgtatcgataccttaaaaccaattgaaaaaataaatcagtaggataggtatgatcaattcaaataatgtttttgccgattatttcagataaacacctgtctgtttaagcaggaattaacaatgcgggggctattattttattaatacattcactgcatcaatatatattaatgcagtgaatgtcatattctctttggaatacgtcaggaggattacaccgcgcggaaggcgatttctcccggaatcacttcaccctgccagtaaagctgtgccgcaacgcgatcggccagttcgcgatagatcgcggtaaattcgctctccggacggctaaccaccgtcggcgtaccgcgatcaagatcttcgcgcagactaatatgcagcggcatctgacccagaagctgagtatggtatttttccgccagcttctgcgcgccgcccgtgccgaagatcggttcgtgatggccgcagttgctacaaatatgcatactcatattttccacaatgccgagcaccggcacttccaccttctcgaacatcacgataccttttttggcgtcgattagcgcgatatcctgcggcgtagtcaccaccaccgcgccggtaacaggaatgttctgcgccagcgttagctgaatatccccggttcccggcggcatatccagtaccagataatccagatccggccacagcgtctcctgcaacatctgcatcagcgccttactggccattgggccgcgccataccatcgcgttatcgtcagtcaccagatagccgatcgagttggtcgccaggccgtgagacataatcggcgccatatgcgtaccgtctggcgatgttgggcgctgatcttctgcgccaagcatggttgggatcgacggaccgtaaatatcggcatcgagaaccccgacctttgcgccttcagccgctaacgccagcgccaggtttaccgccgtggacgatttccccaccccgcctttaccggagctcacggcaatgatgtttttcacgccattaatgccaggctgatttttgacgcgtttcagcgtcgcaatgttgtacgacagtttccagtcgatcgcttttgcgcccgtaatacgtaacagatcggcgctgcattgctcttttaatacctcaaacgcgctgttccagacgaacggcatgaccagctcaacgtgcagcgtatcatccatccaggcgacgtggtgcaacgccttaagcgtggtgaggttatgcttcagggttgggtgctgaaaattcgccagcgtcccggcgaccatcgctcgcagggtatctggtgatttggcctgggattgttcgttcatcccgactccttttgtagttctgaaaagtacgattgtaactttgtagtttactccagcggtaacaattattcatttacggataaatgcccttatcgattggcgcagtaattaccattttggtactatcaaagcccttttttacaacagaagaagtaatacccactatgactcaagtcgcgaagaaaattctggtaacgtgcgcgctgccgtacgccaacggctctatccacctcggccatatgctggagcacatccaggctgatgtctgggtccgttaccagcgaatgcgcggccatgaggttaacttcatctgtgccgatgacgctcatggcacgccgatcatgctgaaagcgcagcagcttggtattacgccggagcaaatgatcggtgaaatgagccaggagcaccagaccgatttcgccggttttaatattagctacgacaactaccactcaacgcacagcgacgagaatcgagagctgtccgagctgatttatacgcgcctgaaagagaacggttttattaagaaccgcaccatctctcaactctacgatccggaaaaaggcatgttcctgccggaccgatttgtgaaaggcacctgcccgaaatgtaaatccgcagaccagtacggcgataactgtgaagtgtgcggcgcgacctacagcccgaccgaacttatcgaaccgaaatccgtggtgtccggcgcgacgccggtaatgcgtgactccgagcactttttctttgacctgccgtcattcagcgaaatgttgcaggcgtggacccgcagcggcgcgctgcaggagcaggtggcgaacaaaatgcaggagtggtttgaatccggcctgcaacagtgggacatttcccgcgacgcgccgtattttggtttcgaaatcccgaacgcgccgggcaaatatttctacgtctggctggacgcgccgattggctatatgggctccttcaaaaatctgtgcgataagcgcggtgacacgaccagttttgatgagtactggaaaaaagactccgatgccgagctgtaccactttatcggcaaagacatcgtctatttccacagcctgttctggcctgccatgctggaaggcagccacttccgtaagccgaccaacctgttcgttcacggttacgtgacggtgaacggcgcgaagatgtctaagtctcgcggcacctttattaaggccagcacctggctgaaacactttgacgccgacagcctgcgctactactacaccgcgaagctttcttcacgcattgatgacatcgacctgaacctggaagactttgtccagcgcgtcaatgccgatatcgtcaataaagtagtcaacctggcctcgcgtaacgccggttttatcaataagcgtttcgacggcgtgctggcggctgaactggccgatccgcaattgtataaaacctttactgacgccgctgcggtgattggcgaagcatgggaaagccgtgaattcggtaaagctatccgtgagattatggcgctggccgacatcgctaaccgttatgttgacgagcaagcgccgtgggtggtggctaaacaagaaggccgcgacgcggacctgcaggccatttgctcaatgggcatcaacctgttccgcgtgctgatgacgtatctgaaaccggtactgccgacgctttctgaacgcgttgaagccttcctgaacagtgagttgaactgggatgccatcgaacagccgctgctctgtcacaaggtcaacacctttaaggcgctctacaatcgcatcgacatgaagcaagttgaagcgctggttgaatcgtctaaagaagaggtgaaagccgcagccgcgccggttaccggcccgttagccgacttcccgattcaggaaaccatcacctttgacgatttcgccaaaattgacctgcgcgtagcattgattgaaaatgctgagttcgtagatggttctgacaaattgctgcgtctgacgctggatctgggcggcgagaagcgtaacgtcttctccggcattcgttccgcctacccggacccgcaggcgctgattggccgccagacggtaatggtcgccaacctcgcgccgcgcaaaatgcgctttggcgtctccgagggaatggtgatggccgcaggacctggcgggaaagatatcttcctgttaagccctgatgacggcgcgaagcctggccaacaggtgaaataagcaacaagccggagcatgctccggcttttttaaccgcttaatcctgactggcatatcaccccatccgcgtgttttaactttttccttaataagcaatagcgttaagactccatatccggactgctaaataacggctaaaagtcatattctatctctccctgatacattgctattactgggttaaattaattcattgaaattattttaaaaacccaatcattatataaaatggagttttagatgaaaatttctggcaagttattgtccgcggctttggcttccgtactggtgttctctcttgctggctgtggcgataaagaagaatcaaagacctttaacgcaaacctggcggggacagaaatttcaattacttacacctataaaggtgacaaaatcattaagcagacgtctgaaagtaaaatcagctatgccactgtaggcgctaaaacgaaagaagatgccgccaaaattctcgatccgctgagcgcgaaatataaaaatatcgccggagtggaagaaaaattaacctatgaagatacctatgcccaggaaaacgtctctgtggatatggaaaaagtggactttaaagcgttacagcaaatctcagggacgatggtgtccggcgataccagcaaaggtatcagcatgaaacaaacccagacgctgctggaagctgctggttttaaagaagcgaaataactggcaggcataatgtattgcatcgactggtaaagtcgctcagggcgctgcttcggcagcgtcttttctttatgaattccgaaaaaagacagcctcgctgtaagtcccctcgccaaagcctataatccctgaattcttggccacaccaatacttaacgacaaggaattgttatgcaggttctacgtcttatggcactgccactattcgcgctctctctatcggttagcataactggctgcgatcagaaaaacgatactctccagggaaagcaaaataacatgacagcgtttatcaagaagatagccgctagcaaagagtcagaggaaacacaacgctatgtaggtaatctcaacggtattgaaatcaagttaacctattactacaaaggggatatcgttttacgtcaaatatctgaacataaactactttataagaccctgaaagccaataataaagaagaagcacaaaaaatgctgagtcaagtcggcgaagcttatcagggtatgccgggtttgactgaacgaatcgactattatgatagctatgctacggaatatgtggatattaattttacccaggcaaaaataagcgacctctgtaaattgccaggatcatcaattgacaactgttccgcgtactatctgtcaatgattcgctcgcagaaactgctggaagagagcggatatcatagaatcaattagtataataatgcgttttcccggtcagacaggacgctgccgggaacaataccgcagaattacttcgccgcgtgttcacgggctgccagaccgcgcagaaaataacgcataaactgatcgccgcattcgcggaagttcttatggtccggcgcgcgcatcatcgcggtgatctctggcattgagacacgaaacaactgaccggtaagtatcgccaggatatcatctgtttttagcgaaaaggcgatacgcagctttttcagcacaatattgttgttgatacgacgttccgccgtcaatgcaggcgccgcctcatctttgccgcgtttttcataaatgaggccattgagaaatgaggacaacacgatatccgggcaacgctgaaacccctcttcctcttctttgcgcaaccagattgcaatctgctccggcgtagcatcaacgttacccagcgccaggatacgcgccagatcggtattattagcttttaaaatgtagcgcacgctacgcagaatatcgttactcagcatgaggccttcggtcgtttctatggcaaaacgatattctaacagtcttttacaggccaatcgcctcttttaaacttttcagatagcgacggcttaccggcaccgtcaggccgttgcgtaaaatcagctctgcctgcccattatcctccagccgtatttcctgcaaatgggccatattcaccagaaactgacgatgacaacgcagtagcggcgtccggctttccagcgtgcgcagcgtcagctcggtaaacccctctttcccttcactgctggtcacataaacgccgctcatacggctactgacaaaggcgacatcatccatttgcaacaaatagatccggctgtgtccggtacagggaatgaatttaagcgcctgctggttttccggcaacaacgaaacatcctgtttactgcgctcctgacgcagacgatgtaacgttttttccagccgtttctcctctatcggcttgagcagataatcaaaagcgtgttcttcaaaggctttgatggcgtattcgtcaaacgcggttaaaaaaacgatatacgggcggtgttccggatcaagcattcctaccatctccagtccactgatacgcggcatctgaatatccagaaacagcacatcaggtcgcaacttatgtaccgcgccaatcgcttctaccgcgttcgcgcactctcccacaatctcaatgtcatcctgcccctggagcaaaatccgcagattttcccgcgctaacggctcatcatccacaatcagcactttaatcatgcgtcctcctccagtggaagtcgtaatgtaattcgggtaaaacagtccggctcgcaggccacgctaataccataatcatcgccaaagtgttcgcgcagacgtttatcaaccagactcatccccagcccgctactgccggcggaaggctgatacagtcccgcattatcctcaatatctaacatcaaatgctgcccttcgcgccgggcgcgaatagcgacgttgccggtatcaagcagttgcgacgtgccatgtttaatggcgttctcaacaatcggctgtaatgtaaacgcaggcaatttctgacgtgaaagcgtcgatggaacatcaagctgtacctgcagacgcgactgaaaacgcgctttttcaatttgcagataagcgtttacgtgttcaatttcatccgccagcgtgacgatttccgacgggcgttttaaatttttgcgaaaaaaggtcgacaagtactgcaccagttggctggcctgttcgctgtcgcggcgaatcaccgctttaatggtattgagcgcgttaaacagaaaatgcgggttcacctgcgcgtgcaacagcttgatctctgactgcgtcagcaacgccttctgccgttcatactgcccggccaggatctgcgcggataaaagctgcgcaataccctctcccagggtgcggttaattgagctgaacagtcggtttttcgcttcgtacaatttaatggtgcccatgactcgctgattttcgccacgcagcgggatcaccagcgtcgaaccgagtttacactgcgggtgtagcgaacagcgatacggcacttcgttgccatcggcataaaccacctctccggtttcaattgctttcagcgtataacctgatgaaatgggtttgcccggtagatggtgatcgtcgccaataccagtaaaagccagcagtttttcgcgatcggtgatggcgacggcgccaatatccagctcctgatataacacctgcgccaccttcatactgttcacttcgttaaatccctgacgcagaatcccctccgttgacgcggcgaccttcagcgcggtagcagaaaatgccgaagtatatttttcgaacatggcgcgcttatcgagcaaaatacgcatgaacagcgcggcgccaacggtattcgtcaccatcatcggcgcggcaatattactgaccagatgcaaggcatcgtcaaacggcctggctatcagtaaaatgatcagcatctgcaccagttcggcaatacacgtaattgctcccgccgtcagcgggctaaacactttgtccgggcgtccgcgacgtatgagaacgctgtgtaccaacccgcccaacagcccttcgacgatggtggaaatcatacagctcagcgccgtcatgccgcccatagaataccgatgtaacccaccggtcagaccgaccagcccgccgacgaccggcccgccgagtaggccgcccatcaccgcgccaattgcgcgggtattggcaatcgaatcttcgatatgcagcccaaaataagtgcccatgatgcagaagatagaaaacgtgacgtaacacagaagcttgtgcggcagacgaaccgtgacctgcataagcgggatgaacaggcgcgttttactcattagccacgcaatgaccagaaacacgcacatctgctgaagcagcagcaacaccagattaaactcgtacatacccgcaaaccacacttcaattaaaagcgcgtaacatacattgagtacaattaactttctttgaactgttgcataaaaatatgaattcgtgaatacgatcacttaaacgccgcgccgcaacccgctacttcgcgttttaatgcataaaaaacaggcaaaacttcctggttcctaaaagagcgtctaaagttaaaccgggacctcgcgagcaagggtgaaacgatggcgctttacacaattggtgaagtggctttgctttgtgatatcaatcctgtcacgttgcgcgcgtggcagagacgttatggacttttaaaaccacagcgaacggatggcggtcatcgtctgtttaacgatgccgatatcgacagaatccgcgaaatcaagcgctggatagataacggcgtccaggtcagcaaagtcaaagtgctgctcagtagcgacagtagcgaacaacctaacggctggcgcgaacagcaggagatcctgctgcactacctgcaaagcagtaatctgcacagtttacggttatgggtcaaagaacgcggtcaggattatcctgcccaaacattgaccactaacctgttcgtcccactgcggcgacgattacagtgccaacaacccgcccttcaggcgctgctcggcattcttgacggtatcctgatcaactatattgcgctctgcctggcgtctgcgcgtaagaaacagggaaaagatgcgttggtgatcggctggaatatccatgataccacccgcctgtggctggaaggttgggtcgccagccaacagggatggcgaatcgacgtgctggcgcattcgcttagccagttccgcccggaactgtttgacggcaagacgttactggtatggtgcggagaaaaccagacgctggcgcagcagcagcaactcctggcatggcgcgcccagggacgcgacattcatccccttggcgtttaaacagaagctaacaaattcgctttaatgtatactccttttattaacataaggagtacataatgcgcgtagcgaaaatcggggtgatcgcccttttcctgctgatggctattggcggtatcggcggcgtgatgctggcaggttacagttttattttgcgtgccgggtaagcacgcgcgtcagcctttcaaacaggcgatcgataatgatcgccgccagcgccaccagcagcgccccctggataacataggccgtattaaagccgctaagcccgataatgatcggcgtgcctaacgtactggcccccaccgttgaagcgatggtcgccgtaccaatattgataatcaccgaggttcggatgcccgccagaatcaccggcgcggccagcggcagctcaacctgatacaactgttggcgacggctcattcccataccgctggcaacgctcatcacgctggcaggcaccgcgcccagcccggccagggtcgcctgcaggatgggcaacaccccatacaggatcaaggcgataatggccggttgctgaccaaaacccatgacgggtaccgcgatcgccagtaccgcgaccgggggaaaggtctgcccgacggcggcgatagtctccaccaggggacgaaactctttcccactttctcgcgtgaccgcaatccctgcgccgacgcccaccacgacggcaaacaaacttgagatgcccaccaaccagaaatgggcgagcgcgagggcggcaaaactctcctgttggtagaccgggcgcggtaaatcgggaaacagcgcggcgaagaacggctggctataaggcaatccaaacagcagaagcaagaacagaacaataagccagagaagcggatcacacagtcgtttcacggggggacgtctccgaaagcagatcgcggaaatggagcgtaccgcagggctcgccctgctgattcgccaccggcaggacgtcgcaccgacgggcgacaaacatcgatagcgcatcgcgtagcgtcatctcttccaccagcgcgtcgccgctgagctgttcatgccgacgtacataatcgcctacgctacgtaacgaaagcagccttacgcccagctcgctgcggccaaaaaatgcctgcacgaaatcattttccggcgaggtcagcatagaaagcggcgatccctgttggataacgtggcccccgtccatcagcaccagatggtcggcgaggcgtagcgcctcgtcgatgtcgtgcgtcaccagtacgatggtgcgccccagcagctgatgaatgcgggtcatctcctgctgcaatgcgccgcgcgttaccggatcaagcgcgccgaaaggctcgtccatcagcaatacctgcggatcggcagccagcgcccgcgcaacgccgacccgctgctgttgcccgccggaaagctgatgcggatagcgatcgcgcagcgcgctttccagacccaataatgccatcagttcatcaatacgatcgttaatccgcgcacgcgaccacttttgtagttgcggtacggtggcgatattttgcgccaccgtccagtggggaaaaaggccgatagactgaatggcatagcccatgcgacggcgcagttcaagcaccggcaggctgcggatctcttccccggcaaaacggatcgttccgctatcatgctctaccagccggttaatcatcttcagagtggtcgattttcccgagccggaggtgccaattaacaccgaaaagctgccttcgctaaaatgcaaattgaggtcgctaacagcctgttgatcgccgaaggttttactgacatggttaaattcaatcatcggttgctcccttcagaaacgcgatccataaatcaaacagcgcgtcgatcactaccgccaacgcaatcaccggaatgacgcccaacaggactaaatcaatggcgctgctcaatagcccctgaaacaccagcgcgccgaaacctcccgcgccaatcagcgcggcgacgacggccattcccactgtctggaccattactacccgcaggctacgtaaaaagaccggcagcgccagcggcagttgcacatgcctgaagcgctggccgctactcattcccatggctcttgcgctctccagcacatcgcgcggcacctgattgagcccggcgaccacgccgcgcaccagcggcaataacgcatagagcaccagagctatcagcgcaggcgtcatgccggttcccgcgacgccgaatgcggcaagccacggaaactgtttcaccagcccggccaacggcgcgatcagcaggccaaacagcgcgacggaagggatagtctggatcacattcagtacggtaaacaccggcccctggcgcgaggcggaaaaataacaccagacgcccaacggtaatccgatcgccagcgccggcagcaccgtgcccgccagtaacatcaaatgttgcaccagcgcggcatcgaaaacatcctggcggttggtatactctttcagaagcgagaggttgtcgaacgtgcctgaaaacagcagcgccagcgggacaatgacaatttgcgcgtgcagcaaccagcgccacagcggcccagtggtaatacggcggatcgcatcgctacaggccagcaacatcagaccgaggcccagccacaatccacttcccagactggtacgcgccagcgggctgccctcctgcgccaactgggtcgccgccctgccgactccccacagcatgacaataaaaagcgtctgcgccatcatcagcgtcagtacgctaccgcgtttaccgggtacaaagcacagcgtaaacagcgcgcatcccgcgccagtcagcatccagatggtcgccggccagatctcccataactggcgcccctcgccgctcaccagacgattcggggcgtaattaatgaaaggcagcgcgacagcaagcaaggtcagaacagccaacagcaacagcacacgattaaccgtgatttttttggcagcatcactcacagattacttcacccaccctttttgtcggaggtaatctgcggcgacttttttcgcatccagcccttctacggcgattctggcgttcaactgttgcagcgttttctcatcaaggctggcgaaaacgggctgcagccagtcggctatctgcggataggcctgtaacaccgattcacgcactaccggcgcgggggcatagataggctggacgccttttgggtcgctcagggtttgcagacccagcgcggcgacagggccgtcggtgccatacgccatcgcggcgttaacgccggatgtttgttgcgcggcggctttgatcgtgaccgccgtatcgccgcccgccagcgacaagagctggttctgattcaaggtaaaatcataggctttttcaaatgccggcagcgcatccgcccgttcgataaattccgcagacgccgccagtttaaaagtgccgccctctttcagataacggctgagatcggcaagcgaggagagtttatttttttccgcgatgtcctgacgtatcgcgatggtccaggtgttgttggccggcgcaggcgtcaaccagaccagcttattctgctccgcatccagttttttgactttctcaaagccttgctttgcatttttccatgccggatcgttttcatctttaaaaaagaacgccccgttaccggtgtattccggatagatatccagctctccggcggtaatcgcgccacgaacgactggcgtcgtcccgagctgaattttattgaccgttttaacgccgtggctttccagtacctgcaaaatcatgttgccaagcagtgcgccttcggtatcaatctttgacccgaccgtcacgggcgatgccgcctgtagaggtaaactcaccgtcgccagcaacgccagcgaacttacccatagctttgagatcgtcatgatgctttcctcatccttttacggcctttttcagagacttgagaaaaaagcatagttgaaaagtctgcgtttaacctgggattttccgccagtttaagtgacgtggcaggcaataaaaggggggacaggaaaagtcattgccagacagggcgctgctatcgcgccctgttgacggcaggcttacagtagctcgaacgatccttgtttaacgcgagcggaatccacgccgataaagacgttgaacttgccgggttccgcgtcatatttcatctgctgattccagaacttcaacgcctcgatatcaatcgggaaactcacggttttacgttcgccgggcttgagggtgattttttcaaagccttttaattgcttcaccgggcggctcattgacgccgtgacatcctgtaagtacatctggatgaccgtagccccttcgcgtttaccggtgttcgtgacctctacgctggccgtgactttgccgtcgcgttgcattgtcggtgaggagagcgtgacgtcagacaccgtaaatgtggtgtagctcagaccgtaaccaaacggatagagcgggccattcgcttcgtcaaaataacgtgaggtgtatttgtttggcttttcaggattatacgggcgtcccgtattgagatggctgtaatagaccggaatttgtcccaccgaacgcgggaaggagatcggcagtttgcctgacgggttgtaatcgccaaacagcacatcggcaatggcgttgccgccttccgtcccggcaaaccaggtctccagaatcgcatcggcctgttgatcttcttttaccagcgccagcggtctgccgttcattaataccagtaccagcggcttaccggtggctttcagagcggtgattaagtcgcgctgactctgcggaatggtgatattggtacggctggaggcttcatgcgccatcccctgcgactcgcctaccactgcgaccaccacatcggcctgtttcgccgcctgtacggcctcatcaatcatcgcctgcggtgagcgcggatcgattttcaccgcctcttcatacaggtttaagaaatcgacgatgcctttatcattagtgatattcgcccctttggcatagaggatcttcgccccgtcgccgacggcattttgaatacccgccagcaccgtcactgactgattcgcgaccccagcagcagaccagcttcccattacatcacgttgactgtcggccagcggcccaacaacggcaatggtgcccgattttttcagcggcagcgtttccagccggtttttcagcagtaccacactttcccgcgccacttcccgtgcctctttacgatgcaggcggctttcggcattggtgtccaccgggtcgctctctttcggccccagatggctataggggtcgttaaacaatcccatgtcatattttacgttgagcacatggcgcgtcgcgtcgtccagttccgccatcgtcactttgcccgacttaatcagacccggcagatatttgctgtaatactcatccgccatgctcatatccacccctgcctttagcgccacgcgcaccgcatcttccgggtcggccgcggtaccgtgtttaatcagttctttaatagcgccgtggtcggaaacggtaattcccttaaagccccactcatcgcgcaggacatctttcaatagccaggaatctgacgtcgcaggcgtgccgttcagcgagttcagcgccaccatcaccgcgccgctccccgcatccagccccgctttgtacggcggcatgtagtcattaaacagacgctgggaactcatatccacggtgttgtattctttaccgccttcaacggcgccataggcggcaaaatgtttcacgctggtcatcaccgaatagcggtccgccgggcttttgccctgcatcgctttcaccatggtttcgcccatgatagaggttaaatatgtatcttcgccaaagccttcggaggcgcgtccccaacgcggatcgcgggagacatccaccatcggcgcccaggtcatattcaggccgtcgtccgccgcttcatacgccgatacgcgtcctacggttcttaccgcatccagattaaaagaagaagccagaccgaggcttatcgggaagacggttcgctggccgtgtaccacgtcataggcaaaaaagagaggaattttcaggcggctcaacgccatcacctgatcctgcatttgacggatatcctggcgggtgacggtattgaaaatcgcccctacctgcccgtctttgatcatctcgcgaatcgcttctttcgggttatcagggccgacgctaatcagacgtaactgaccaattttttcatcaacagtcattttcttgagtaaatccgtgacgaacgcgtcgcgcgcttcgggcgtcagcgggtgattgccaaacaggttttccgccaatgctggctgcatcgccagactcacagcaacacctactgaacataaccatttcatgttgagtctctctttatctttatcccgacgaggcggtaaaaacagaataaaaaccgcagtttgccataagcctaaacgcgagaggagaagaaagcgaaggttattctcctaattttccgcacagtcgaatacacaaccgccagcaaatggtatcaaggcggcaaatgaataccaccaacacagaaacaatttgaatgagaaagcgtattgtcatacaaagcgctatgcttaacgctgatattttgtcccaccacaaggagtggagaatgtcttccataacaatgactgataataaaacgttcctgaatgagctggcccgcctggtaggccattctcacctgctgacagaccccgccaaaaccgcccgctatcgcaagggtttccgttccggtcagggcgacgcgctggccgttgttttcccgggttcattactggaactgtggcgtgtgctcaacgcctgcgttaacgctgacaaaattattctgatgcaggccgccaacaccggtctgacggaaggctccacgccgaacggcaacgactacgatcgcgatattgtgattatcagcacccagcggctggataagctgcacttactggataacggccaacaggttctggcctggcccggtacgacgctctatgcgctggaaaaagcgcttaaaccgctgggccgtgaaccgcactcggtgattggttcgtcgtgtatcggcgcgtcggtcatcggcggtatctgtaataactccggcggctcgctggtgcagcgcggcccggcctataccgagatgtcgctctttgcccgtattgacgaccaaggcaaactgcaactggtcaatcatctgggtatcgatcttgggcatacgccggagcagatcctgagcaagctggatgatgaacggattaaagatgaggatgtgcgtcacgatggtcgtcatgcgcacgatcacgactacgtgacgcgggtacgagatatcaacgccgatacgcccgcccgctataacgccgacccggaccgtttgtttgaatcttccggctgcgccggaaaactggcggtttttgccgttcgccttgatacctttgcagcggaaaaaaatcagcaggttttttatatcggcaccaatcagcccgcggtactgactgaaatccgtcggcatattctggcgaacttcgacaatctgccagtggcgggagaatatatgcatcgcgatatctacgatattgcggagcagtacggtaaagatacctttctgatgatcgataaactcggcaccgacaagatgccattctttttcacgctaaaaggccgaaccgatgcgatgctggaaaaagtaaaatttttccgtccgcatttcaccgaccgcgcgatgcagaaattcggccatctgtttcccagccatctgccgccgcgaatgaaaaactggcgcgataaatatgagcatcatctgctgttaaaaatggcgggagacggcgtcgcagaagcgcaacgctggctgaatgaattttttaaatccgctgagggcggtttcttcacctgtacgccggaagaaggcagcaaagccttcctgcaccgcttcgccgctgctggcgcagcgattcgttatcaggccgtacacgctgatgaagtggaagatatcctggcgctggatatcgccctgcgccgcaacgataccgactggttcgagcatctgccgccggaaatcgacagccaactggtacataaactctattacggtcactttatgtgccacgtttttcatcaggactatatcgtgaagaaaggcgtcgacgtccatgcgctgaaagcgcaaatgctcgagttgttgcaggcgcgcggggcacaatacccggcggagcacaacgttggacatctgtataaagcgccggaaacgctgacgcgtttttatcggcaaaatgacccgaccaacagtatgaaccccggtatcggcaaaacgagtaagcggaaattctggcaggaaaatacgcccgacgaaacgcattaacaccgtgcggtttaccgtgaagcccggcggcgcgatgcctgccgggcctgcggcgacttaatcgttctgtgcggtttgcgctccggcactggcgctggctgccgccatttgcgcggctttttgctttttatagctcagcgcggcagccggaacgggcatgactttaccggtttcaatccatgtacgcaggcggctggcgtccgcaaagtgggtatatttgccgaacgcgtccatgaccaccagcgcgaccggtttgttattgatcacggtacgcatcaccaggcaatgccccgccgcattggtaaatccggttttcgttaactggatattccagttatcacggtagaccaaatggttggtattgcgaaacggcagcgtatacgccggatgcgagaatgtcgccatgtcttcgcgcgtggtgcttagctggccaatcagcgggtattgcttcgtggcaatcagcaattttgttaaatcccgcgcggtcgagacgttatgaatcgacagccccgtaggctcaacgaagcgggtatgcgtcatgcccagcgctttcgccttcgcattcatcgctttaataaatgcgttataaccgccaggataatagtgcgccaggcttgccgccgcacggttttcggatgacatcaacgccagcagcaacatatttttgcggctaatttcgctgttcaggcgcacgcgggagtaaacccctttcatttccggcgtctggctgatatcgaccttcagtatttcatccagcggcaatcgcgcgtcgagcacgaccatcgctgtcattaatttggttatcgaggcaatcggacgcaccagatccgggtggttcgaatagatcactttattggtgttgagatcaacaatcattgcgctaccggaggcaatctcaggttgagacgccgcggttgtcgctgccgttttcgccacagcctgcggggcaaaaggtacggccaacatcagagcaaggctcaggaatgaagctcggaatttcagcatgatgagatttctgataatgattcacgcgcgtcgtaacgcacaccgcctgagctaagattatactcaagctagcagtggcatcatagcggcacgccagcgttgccgctacagaagaatcgtcagcaaatgctgcattgctggcttttgcgccagccctttttctcatcagaacaggcggtagccgtatccccacaggatcacggtgatcgccagtagcacctccaggaccagcacgccgatagcgagcgtcgaactggagaagcttaatccttcctctctattaatgttaaggaaagtcggaatacccaaatacagcaaatagccggtgtaaaaaagcgcgacagcgccgaccagtgcgcatagccataccaggggatagagcgccaccagaccacttaaaaacagcggcgtcgcgacatagccggcaaaaaccatacagcgcgcaagcgatggccgttgcggatagtttcgcgccatccaccagatgacgcgtcccatcaccgcgacgcccgccagcatcacgccgtagaacaagaccgccagcgcaaaagcggtaaacagcgagagttgtaacacgttgccgtcgccaaaattccagccgatttgcgtcgtgccgataaaggcgcagacgacgggaatcgccgccatcagcaaaacatggtgcgtatagtgatgcgaaacagtttcgttttcgcttttgatcacctgcatttcccgatcgggatgggaaaaaagcccccatacatggttcatactgcccccttctgctgcctcagatgccagtatgttcaagtataattcagtttctggttattttatgaacaatggcaaaatagtctccggcaaaacgtcggctttgccgcgcacgcctcttgccagggtgtatgcttaatgccggaggtggtttacgcatggatatcaacacgcttattacgcattatggctatgcggcgctggttatcggcagtatggccgaaggtgaaaccgttaccctgttggggggcgtcgcggcgcatcagggattgctcaagtttccgctggtggcggcggctgtcgcgctgggagggatgatgggcgatcagctactttatctgttaggacgatgctatggcgggaagatcctgcgtcgtttcccccgttatcatacgaagattcgtcgcgcgcagaaaatgatccaacgccatccgtatctgtttgtgatcggcacgcgttttatgtacggcttccgggtggttggcccgctgctgattggcgccagccgcctgccgcctaaaatttttctgccgctgaatattgtaggcgcgctgatctgggcgctgctgtttaccacgctgggatatcttggcggcgaggtgatcgcgccatggctgcacgacctcgatcagcatctcaggcacggggtctggctgattctggccatcgtcctggtggtgggcgtgcgctggtggctgaaaagacgcggcaaagcggaggcccgttaaacccgatggtatccggatggcataacgccgccatccggcacccggcgtttattttgcgttgaattgcggattcgccagcataaacccgccgtcgacaatcagcgactgaccggtggtgtagcttgctccttccgaacacagccaggcgacgaggctggctatttcatgcgtagaacctggtcgggcgatagggattgagggttccgatcccggctcaatgtcgctgtcatccatatcattcatcggcgtggcgatagcgcctggcgcgacggcgttgaccaaaatatgatgctcaatcagttccagcgccatggatttagtcaatccccccaacgcatgtttcgccgcggtataggcgctggcttgcggaagcggcgtatgctcatggacggaggtgatgttgataatgcgccctccctctccttgtttaatcatatgccgggcggcgatctgcgcgcagagaaacgcgccatcgacgtccacggtaaaaatttgccgccactgcgtaaacggcatatcaataaacgcggatttggtcatcgccccggcattattgaccagcacgtcaacgcgccccaggcgctgaataagatgttcaatggcctgcgcgccctcgggtaactggctcaggtcaagatgaatggtctctgcccgcacaccaaactgcgccgctttttttgccgtctcctgcgcgccgcgttcatcggaatgccaggtgataccaatatcaaaaccgttttgtgctaataacaacgcacacgctttgccaattcccgaatctgatgccgttacaattgcgactttggtcatattcctctccggatgaatcatacacagcctaagtataggaaccctgtctgaatcatccggaaaaatcaggaatgataaccgccgcccagcgcgctggtaagctgaatagaggcatccagccactggccctgcaacagcaagccgttacactgctcgcgcagtgccgggattttggcctcgctcacgcgggaacccgcaataataccggcattaaagcgcgcttgcgccagaccgaccacacgctgcgcgtcatgctcaatctgctgctgatgctgatttttctgcgccagcgtctctacctgactggcggcgcgcgccacatcattaaccgcatctaccaccgctttgttgtagttggcgatagaaaggttgctttgcgctttggcgatatcgaggttggcattcagcctgccgctgtcgaaaatcggcagcgtcagcccgccggtaatgccatattgctgtgcggaatggcggaacagatcgctcagatgtaacgcatcctgctgtaaaaaagccatcagattgatatcgggataaaacgcggccttcgcggcgtcaatgctgctcaacgaggattcaatgtaccagtgcgcggcctgtagatccgcccggcgcgccagcaacgaatagcccagttgcgacggtaactggctttcaacggcggggagactcacctgacgcagcttgagcgccgccgattgcgtattggttaacgcgctgagccgcgcttcaataaccttcattttaccgttaacgtcattcaactgctgctgggttttgctggcgtcgatatcggtctcgaccccttcaacagaagaagtaataccgtgttgatacagctcccggtttaccgccaccacgttttgctgctcatgctcgatttgcatcagcacatttttcagcgctgcctgtgtttgccactcccagtagagtcgcgccacgccgcttgccagcaattgtcgggtctgctcctgctccgcttcgcgcgctttgaccgccccgatccgcgcagtaacttcagcgcggtttttcccccataaatccagatcccagcccgccgtcaggccgaatgtaccgttggtataccacggcccggtcgttcccgccgcagggtcggtaatcgcgaatggccccatcagcccttccgcggacattcgctggcgctcaatgtcggcagaaaagtcgagctgcgggccgtcctgcgcctcaaccgctttcgcctgcgcttccgccagttgaatacgctgttcagccacctgcatatccggcgaatgctgtatggcattatcgatcagcgcgtcaagctgcgcatcgtgatacgccttccaccactggctatccggccaaccgtttttcaatgccgccggcaggctggaatcaacatgagaagagggcgtctgctgggtcagcgactggcgggtatcgtgcatgggggcgcaacccgccagcaaaataaaaagcggtaagctcgctgtcgcggcaaggaaagaattacgattcatggaggtgttctgataaaaaaaggtgcgcagagagtacgtcttacggcgatctattttttagttacgcgtggcaatacatcatcagacaacaaaagacatattttgaaatttatatgattagtaaataatttcatctgatacattttttgatgtaatacttcaatgaaaagtcccactaacccgttcataaatgaacgattttgctgcaatacgcgccagcagccttcatgagttaaacgtcgccgcgcccaacaaagcagcagatggcttaatactttcctatactttgtttgtatttaccaataaagggacaaacaatgaaaattcttctatgggcaatcttaattatttttctgattgggctgttggtggtaacgggcgtgtttaagatgattttctgattcctgcgccgggcagcgatagtatctgcccggcacacgttctggacgctgtagagattagattttaatagcctgaatcgcccgcgcaatctcggacgaacggtttaacgcccgaatcgactgaaagagttccgtcgcctcaatatattccttacgtaaatatcccagccactgtttaatacgcgcgacatgatataaaccggtatcgccctgcttttccagtcgggtatatttttgtaataacgtcaccacttccggccacggcatacgcggctcgttatacttcaccacccggctcaggttaggaatatttaacgccccacggccaatcatcaccgcatcgcagccgctggtcgccatacatgcctgcgcgctctgccagtccaagatttcgccattcgcgataaccggaatagtcagacgctggcgtatttcgccgatcgcctgccagtcgatatgctcggcgcggtagccctgcgctttggtacgaccatgcaccaccagttcactggcgccagcctgctgcaccgcatcggcgatttcaaattttctatcgccgctatcccagccgagacgcacttttaccgtcaccggaagatgcgacggtaccgcggcccgcatcgctttcgcgccctgatagatgagttcgggatctttgagcaatgtcgcgccgccgccgctgccgttcaccacttttgacggacagccgcagttcaggtccacgccatacgatcccaacgccgtcgcccgcgcggcgttttccgccagccactgcggatgctggcccagaagctgaatacgcaccggcgtgccggacggcgtgcggctggcgtgatgcaactccgggcagatgcgatgaaacacttttaccggcagcagctgatccaccacgcgcacaaattcggtgatgcagagatcgtaatcattcacttcggtcagcagctcgcgcactaacgcgtcgagcacgccttccatcggcgccagtaaaacacgcatatcggtatccacagcaaaaaaagaggcgctatcataacgcctctctgcgatgagcaaaactttttgccgggtggcggcgcaaacgccacgctacgtcacgtaaagtgctcaacgcggctcaagacagttatcttctttccagccgtacagccattcgataccgcgataaaacgcctcctgcgatttccctttccacaacagattacgcacctgacgctccaccccggcggcgtgatagagacgccccatctcgcgggtagaccagacgatacgcgccgtgcggggaatacgcaccgactcatacagcgcaaatgcctgctgcgcgtcgccgtcgcagcgttccagcgctttgcctagcgtgacggcgtcttccagcgccatacaggcgccctgggccatatattgcgccaccggatgcgcggcgtcgcccaccagagtgatacgctcggttccccattttgcgaccggctcgcgatcggcggtcgaccagcggcgccaggaggtcggcttatccagcatctggcgcgggcggggatgaatgccggcaaaataagagagcacctcttctttactgccgtctttcacgccccactcttcttgctggcggctgtggaatgtcaccaccagattgtactgttgacctccgcgtagcggataatggaccaggtgacaatgcgggcctgcccacagcaccggtgcgttaatacgtaaatcgtccggcatatcgtcgcaatcaatcaccgcccgatagactacatgccccgttacgcgcggcgcgtcgccgagtaaactttgccgcacgaccgatttaacgccgtcgcagcccacgagaatatccgccgtccagctatttccctgctcatcaaacaccgtaacgtcatccggcgtctggcggatatcgacaatatgggtcgaggtacgatactccacgccagggtgcgtcagcaccgcttcccataccgttgcatgaatatctacccggtgaattaccgcatacggcccgccaaaatggtcgcggaacgcctgtccggtttcaatgcataccacttcttcggcattcacggcatccatcatggtaatgtgatcggtaaacaccgcacgctggcgggcaacatcgcccacaccgagactatccagcgccgaaaaagcgttcggcccaagctgaatacccgcgccaatctcgccaatttcgtgcgctttttccaacagcatgacttttattccctggcgcgccagcgacagcgcggtcgccgcgccgccgattccgccacctacaataattgcgcttgtcacgtgagtcatggtcattctccttttcaggccgggattttatcttgttgattttccggcgcggcggcaataaacgccggtagctgtacgcaggcgtcataaacggctttacagcgcggatagcctgataaatcgcagcccatcctgagcgcattcgcccactgaggaatcaggcagcagtccgcaaggcctggcgcgtcgcccacgcagaatcgtccggactgacttttacgcaatagctgctctaccgcgcttaacccttgctgtatccagtgggcgtaccagcgttttttatcctcttcgctaaccttcagctcatcggtcaggtagcgcaacacgcgcatgttattgattgggtgtatatcgcaggcgatagcgtagacaatttccagcgcctggctgcgcgccgggtcgctcgtcggcagcagcggcgtttgcggaaaatgtcggtccagccagtcgacgatggccagcgattgccccaacgattcgccgtcatcagtgaccagcgtcggcaccaggcctaccggattcatccgtcggtaggccagcgcattctgctggccgatacgaatattgacgcccaccgtctggtaatcaatcccctttaacgccagcgcaatacgtacacgataagacgccgaactattaaagaaactgtacagcttcatcgttcacctcagacaattttcacagcaatcggcgtcagaccttctacgttcccggtgatgacatcccctttcaccactgcgcccaccccctctggcgtaccggtgaaaattaaatcgcctggctgcaattcaaagaagccggacaaatagctgatggtttcattcaccgaccaaatcaggtgacgaatatcgctgcgttgatggtcttcgccgttaacctgtagccaaataggggcgttatccacattatgcgtttcagcggctttgtgtaatggcgcaatgggcgcggagagatcgaacgctttgccgatttcccacgggcgtcccatctgacgcatttccatctgacgatcgcgacgcgtcatgtccagaccggtggcgtatccccagacatattcatgggctttttccagcggaatatcgctcccctttttaccaatcgccaccaccagctcaatttcataatggtagttatcggtctgcgccggatacggcagttccagggtatcccccgccgctaccgggaccacagcgtccgctggtttacaaaagaagaacggcggttcgcgatcgggatcaaagcccatttcacgggcatgggcggcatagttgcgacccacgcagtaaacgcgacgtaccggaaactgctcatcactgcccgccacgggtactgttaccggggcctgcggctggaatacatatttggtcatgttctctctccctaattaataacgtgcttcgcggaacagccccagggcttcctgaaccggcttgtccgaaaaactgaataacaccgtgtcttcgctgctgcgaaacgacacctcatgccaggtcggcgccacaaaaatgtcttttgcggaaaaatgaaaagtttcgttgccgatagtgacctgccctgccccttcaacgacgtggtagatagtgctgtcggtgctccgcgccacacgcgaggcaaagccttttggcagcagttgcaggaacgcgcccatcgacggcatcggataaccgccggtgacgggattaacgtaacgcagcttgtagccttcccactcatccggatcgcccatacgggtcagatcgtgcaacgcctcgcgactgcggtcgtaacggtagttgaaaatcggcgacgagttcccgcgctggtggcgcagcggcagcatattcgctgcatagcgcggcagataatcgccctcttttcgcgtcaccggctgctgatcttcgggatagtcttccgcaaaaccacagcccaggagattgactaacggcagatccagaccatccagccataccaccggctctgatcccggattaccatgatcgtgccagcgccactgcggcgtcaggataaaatcgccggtatgcattggcgtgcgctcgccgtccaccgcggtaaatgcgcctttaccttcgacgataaaacgcagcgccgactggttatggcgatgactcggcgcgacttcgccgggcaggatcagctgtaaaccagcgtataaggtcgccgtgatcgacgactgaccgcgcaatgccggattttccagcaccagcacccggcggatcgcctctttcgcgccaatgacattgccgctttccatcagtagcggacgaatttcctgataattccagtaggccggcgcgcagttggcgtttggcgtctgcggtaccaggtgatgtaacgattcccacagcggcgtcagattctgcccggaaatatgctggtaatactgctgacggctatcttttacgttctgatttatttcagacatggagattctccttattcgtttacgacgctggcacgcggcaggtcgtcaggtacagaaatcgaaaggcggacaaccactgtcagcagggtaagcattaccgcgctgatagccgccggaatagcaatgacaaaaaacaacgtatcgaaagagaaattgagggccatcatcatgccgccggagagcgaaccgacaatcgccccgcagcgtccaatggcgttcgaccagctcacgcccgtcgcccgactttgggtggggtacagcgtcgccgtcagagcattcagcccgacctgggaaccgctaataccgatgccggtaccaaaaatcgccagcgccatcagccaaaggccgttttcgctcaggcctatcatgacaatgcaaactgcgcccagcgcatagctcaccgccagtacccggaacgggttaagccggtccatcaacacgccgagtaacagcgcgccaagcgtgccgccaacctggaatgcggcagtcacccacgacgcctgttgcagatcaatacctcgatggttaagtaacgtcggcatccagctggaaagcagatagataatgagcaggctcataaagaacaccacccataacatcagggtaatgacaagctgtcgcccggcaaaaagctggcgaatactgcctttggcgacggctgccgtctcatgcagaaagaattgcgtatcgtgatagcgctcgccggtaatggcgctgaccgtccgggcgacaacggcttgcggtagttggcgacgtacctgccagcggggagattccggcagcgcgaacagcaggccgaaaaacagcatcaaaggcaagatgccgcctagcgccagaattccgtgccagccaatcagcggcaccagttgcgcgctcacaatcccgcccatcgccgaccccagggtaaaaccgcagaacatcagcgtgaccagcgctccgcgtcgacgagcgggaaggtattccgacgtcatggtgatggtattcggcatcgctccgcccagtcccagaccggttaagaagcgcagcaacaccagggtttctatatccggcgagaaagcggaaagcaggctcaatgcgccgaatagcgccacgcaaagctcaatgacccgcttgcggccaaagcgatccgccagcggcccgcatagcagcgcgccggccgtaagccccagcagccctgcgccaaacagcggcgcaagttcgctggcgcttagctgccagtgggtacgaatatccggggcgatgaagccaatcgcggcggtgtcgaaaccgtcgagcataaccaccagaaaacagcagatgataacgcgccactgcattttgccgacgggcgcggcatcaataagggcttgtagatcacgtcgttgagtcatagctaatgcctcagtgcagggagatagatgttgtttttatgtttgctatgttacgagtttgtagagtgagcgataaaatgtacaatggcttttcaggcagagacataacctggaggttatagcgaatggcgaactgggcgcagaaattgaaattacatcacctgcaaacgctggttgcgctgggcgaacagggcaacctgacgcacgtcgcccggatgatgaatatctcccagccggcgctatcgaagtggctatctcaactcgaagatgagataggcatcacgctttttgagcgccacagtaaaggactacgcccctcggaaggcggtaaattactgctccagcacgcccagcgcctaattaacgatctggagcgttcacagtatgaaatcgcccgtttcaagcagggcggcctggttggcagcctgaagatcggctgttcgcccgtggcgactgactgcgtatcacaggcgattctgagcctgcttaacgaaatgccgacgctgcatctgaatattgaagagaaggtaatgacgccgctgctgcacgatttgcttgccggtcaggtggatgtggtggtagggcgtgtcggcggccgcgccctgcaactgccgcttaattatcaggtactttataccgagccggtctgctttgtggcgcgtccgcaccatccgctggccgcgcgagcgcagatcgcctggagcgatctggcgcactggcggtggatagtctggccaaccggcacccctattcgcatcagtattgataacgccctcgtcgataatggcgtcatgctcccggaaaacaccattgaatcggcgtcaatgaacgtcagcaccaatttgctgcaaagcagcgatatgatctctattctttctttacggctggcgcaacgctatgccagccaggggcaactggcgattttaaacttgccaaaaattgagcaaaaaggcagcgtagggatgttctggcgtaagaatgagacgccgtctttggccctgagtcgctttttgtattttttagcccaggtttagcgccgccgaccaggggcattgcccgatgttcctgctgtctatacccactatgctaagaattcatgatgtgatcggtagcacgttttaacgtttaattgtatgatgaatccatctcatcaagggctttaaacatgagtaagtcactgaatattatctggcaatatatacgcgcttttgtattgatttatgcctgtttgtacgcaggcatttttcttgcatcactgcttcctatcactattcccggcagcattatcgggatgttaattctgtttgtattgctggcgctgcaaattctgccggcaaagtgggttaaccccggctgttatgtgctgattcgttatatggcgttgctgtttgtgccaattggcgttggggtcatgcaatattttgacttactgcgcgcgcaattcggcccggtggtggtctcttgcgctatcagtacgctggtcgtttttgtggtcgtaagctggagttcacatctgatacacggtgagcgtaaagtggttgggcagaagggaacgaaaaaatgatgacatatatctggtggtcgttaccgctgacgctggcggtatttttcgccgcccgccgactggcggcgcattttaaaatgccgttgctgaatccgctgctggtggcaatggtagtcattattccttttctgttgctgaccggtattccctacgagcactacttcaaaggcagcgaagtacttaacgatctgctgcaaccggcggtagtggcactggcctatcccctttatgaacaattgcaccagattcgcgcgcgttggaaatccattattagcatctgttttgtcggcagtctggtagcgatgattaccgggacatccgttgccttgctgatgggcgcaacgcctgaaatcgcggcatcggtactgcctaaatccgtgactacgcctatcgcgatggcggtgggcggcagcatcggcggcatccccgcgatcagcgcggtatgcgtaatttttgtcggtattctgggcgcggtgtttggccacacgctgttaaacgcgatgcacatccgtactaaggccgcacgcgggctggcaatggggaccgcctcacatgcgctcggtactgcgcgctgtgccgagctggattaccaggaaggcgcgtttagctccctggcgctggtgatctgcggcattattacctcgctggtagcgccctttttgtttccgctcattctggcggtaatgcgctaacgacgggacaaaagaccgggttaaaatttgcgatacgtcgcgcatttttcattgaagtttcacaagttgcataagcaatgagatttagatcacatattaagacatagcaggcccgtaaactacggttccattacattgttatgaggcaacgccatgcatccacgttttcaaactgcttttgcccagcttgcggataatttgcaatcagcgctggcccctatcctggcggaccaccattttcccgccatgctgaccgcagagcaggtctcgacgcttaaaaatacggcgggactggacgaagacgcgctggctttcgcactgttacctctggcggcggcctgcgcccgtaccgatttgtcccattttaacgtcggcgcgattgcgcgcggcgttagcggcaactggtatttcggcgcgaatatggagttcctgggcgccaccatgcaacaaactgtgcatgctgaacaaagcgcgattagccacgcctggctacgcggcgaaaaagggctcgccgccgtcaccgttaactacacgccttgcggccactgtcgccagtttatgaacgagctgaacagcggtctggatctgcgcattcatctgccgggccgcgcgccgcatacgttacgcgattatctgcctgacgctttcgggccaaaagatctggagatcaaaacgctgctgatggacgagcaggatcatggctttacgttaacgggcgatacgctaacgcaagcggcgattacggcagccaataagagccatatgccttatagccactcaccgagcggcgtggcgctggaatgtaaagatggccgtattttcaccggcagctatgcggaaaacgccgcctttaaccctacgcttcccccgctgcaaggcgcgctaaacctgctgagtctcaatggctatgactatgcggatattcagcgcgcgattctggcggaaaaaggcgatgcagcattaattcaatgggatgccaccgccgcaacgctgaaagcgttaggttgccataatattgaccgcgtgcttctcggctaagcaaatgtgccggatagcgacgcactggcgtcttatccggcctgactctcctcttccgcgacccgatacaagggaaatcatgctgaaaatctccgcaatcagacggcggtttcttgcgctacgtcttcgggtacagtagcctgatcgtactttcatcctggtatcgagtttcctgcatgttaaagcgcgtgttttacagcctgttggtcctggtaggcttgctgctgttgacggtgcttggcctcgatcggtggatgagctggaaaacagcgccctatatctatgacgagctacaggatctcccctaccgccaggttggcgtcgtgttagggacagccaaatactatcgcaagggtgtcattaatcagtactatcgttatcgtatccagggcgcgttaaacgcttacaatagcggtaaagtcaattacctgctgctcagcggcgacaatgccctgcaaagctataacgaaccgatgaccatgcgcaaagaccttatcgcggcgggcgtcgatcctgcggacattgtgcttgattacgctggcttccgtacgcttgactccattgtgcgtacccgcaaagtgtttgataccaacgactttattatcatcactcagcgcttccactgcgaacgcgccttgtttattgcgttgcatatgggcattcaggcgcagtgttacgcggtaccttcacccaaaaatatgctgacagtgcgcctgcgcgaatttggcgcccgctttagtgcgctggcggatctctatatttttaaacgcgaaccgcgttttttaggcccgctggtacctattcccacgcagcatcaggtgccgaatgacgcccaggggtatccggccgttacgccggaacaattgcttgaactggaaaagaaaaaagggaaatgatcatggatgtacagacgatatttgtcatattagcctttctgctactcccgcttttttgcttccgtgaggcctggaaaggctggcgaaccggcgcggtagataaagttgtcaaaaatgcgcgaaaaccggtttatgtctatcgccatgccgatcccgtacaatattggtcttatctttttctttataccggttgcggttttttatttactggaatgattatttatcttcttttttatcgttaatctatttattatccctttaaaattgagaatagttattattatgatataaggaacaaatgctgttttgcattctggtttcatttttttgtgaattctttcacagaatacccttctttcaatgcttaggctggcggtagattttagatcattaaaacgcgttatttgcgtttcgccttaatttattcaagcattaaggaagattatatgccgcaacaaaattatctggatgaactcacgcctggttttacgccattactggcaataaaagaggcttcacgttgtttattatgtcacgatgcgccctgtagtcaggcttgcccggcgcaaaccgatccggggaaatttattcgttctatttactttcgcaattttaaaggcgcagcggaaactatccgggaaaataatgcgcttggcgccgtctgcgccagagtctgtccgacggaaaaattatgccagcgcggatgtacacgttccgggatagataaacctattgatattgcacgcctgcaacgttttattaccgattttgaacagcagactgccatgcagatttatcagcccgggagtaaaacacgcgggaaagtcgcgattattggcgcgggtccggcaggtttgcaggcaagcgtgacgctcacgcatttaggctatgacgtcaccatttacgaaaaacagccgcagcccggcggatggctgcgtcacggcatcccggcatttcgtctgccgcaaagcgtactcgatcaggaaattgcccgcattgtagaaatgggcgtcaatattaaatgtaattgtgaggtgggcgggtcgctatcgcttgcgcaactcaaagccgaatatcgcgccgtgctgatgaccgtcgggatgtcctgtggctctggtttaccgttatttgagcaagccagtcacgtagagattgccgttgattttttacagcgcgcccgtcaggccgacggcgatattagcgttccgcgtagcgcattaattattggcggcggcgacgtagcgatggatgtcgccagtacgttaaaaattctcggctgcccttccgtcacctgcgtggcgcgggaagaattagccgaattccccgccagcgaaaaagaatttaccagcacgcaggcattaggcgtatcgattattgatggctttacgcctgtcgccgtcagcggaaataaagtgaccttccaccatgtacgccactcaggagaactgacgctggaagcggaaaatattattttggccgtggggcagcacgcgcgactggatacctttgcggagataaaagcgcagcataatattatcgacacgcataattatcaaaccgacgacccggcgatctttgccgctggcgatattgttaaaggtgataagaccgtcgtttatgcggtaaaaaccggaaaagaagccgctcaggctattcatcattatttagaggaggcctgctcatgttaacaaaagatttgtctgttaccttttgcggcgttaagtttcccaatccgttttgtctttcttcttctccggtaggcaattgttatgagatgtgcgccaaagcctatgataccggctggggcgggatcgtttttaaaaccattggtttttttattgccaacgaagtctctccacgttttgatcacctgacgaaagaagataccggttttattggcttcaaaaacatggagcaaattgctgagcatccgctggaagagaatctggccgccattcgacggctaaaacaggattatccggataaggtgctgattgcttccatcatgggagaaaatgaacagcagtggcaggaactggcgcgtctggttgaagaagccggcgcggatatgattgagtgtaacttctcttgcccgcagatgacctcgcacgccatgggaagcgatgtagggcaaagcccggaactggttgaaaaatactgccgcgccgtaaaacgcggttcatctttgccaatgctggcgaaaatgacgccgaatattggcgatatgtgcgaagtcgcgctggccgccaaacgcggcggagccgacggtatcgccaccatcaacaccgtgaaatccattactaacatcgacctgaaccgcaaaatcgggatgccggtggttaacggtaaatccagtatctccggttattcaggaaaagcggtgaaacccattgcgctgcgttttatccagcagttgcgaatgcaccctgaactgcgcgatttcccgattagcggtatcggcggcattgaaacctgggaagacgctgccgaatttctgctgctgggcgcggcgaccctacaggtgacgacaggcattatgcaatacggttatcgcattgtagaagatatggcgagcggcctcagccactatctggccgatcagggatttgcctcattacaggagatgatcgggctggcgaatggcaatattatcccggcggaagacctggatcgcagctatatcgtctatccgcggattaatcaggagaaatgcgtcggctgcggacgttgctatatctcctgctatgacggcggtcatcaggcgatggagtgggatgaacacagccgcacgccgcattgcaatacggaaaaatgcgtcggttgtctgctgtgcggtcatgtctgcccggtcgcctgtattgatttaggcgaggtcaaatttaaaaaaggcgaaaaagagcacgcgttaacactgtagctctcggtatgaagcccggcgcgcagtttcgctgcgccgggttatctgataagcaaggcaataggtctggataactacttcttacgcgcgtatttcagcgagtccagcgccacggcgaaaatgataatgccgcctttgataatgtactgccagtacgggtttaccccgatataggtcaggccgtagttgatgacggtaaagataatgacgccggtcaccacgccgaagaccgtacccactccgccgctaaacgatacgcccccgaccacgcacgcggcaatcgcatccagttcatacataaagccgaggttgttggtggcagaaccaatacgccctgcttccagtaagccgccgaaggcataaaacacgccggagagcgcataaatcatcagcaggttcagcgccacgtttacgccagaaactttcgccgcttccgggttgccgccaatagcaaaaatgtttttaccaaaacgggtcttattccacagcacccagacaaacgctaccgcaatcagagcgtaaaaggtgatgtatgagagccggaaactgcccatcgccacaaagccctgtgcaaaggtggaaaagccgctgtcaaagccggaaatgggcgaagcgccgacaaagtcatagtaaagggagttgatcccataaacgataatcatcgtgccaagcgtggtaataaacggcgtcacgttcaggtaagcaatgatgatgccgttcaccaagccaatcaccgcgccaatcgcgcagacaatcaggatgaccagcgcaatcggcatggtcgccatttccggaaacactttattggcgttttccattgattgcagtaatgttgccgccacgaccgccgccagccctacctgacgccccgccgacagatctgtcccctgggtgacgatgagtcccgccacgcccagcgcgataataatacgtaccgaagattgcgtcagaatattacttaaattcagcaaacttaaaaaagtcgggtcctggaaaataataatcgccagcaacactaaaagaacgacgtaaattccgccctctttcagccaggtcaaaaagcttttcttgtttaacgcactcataaggagcccctgatcttaaaggtgcaaagaagcaagacgcaaaatttcgttttgcgttgttgttttagtatcgacaatgccggaaacgagaccgttactcatcaccaggatacgatcggtaatccctaacagctccggcatttcagaagagataatgatgatccccttgccttttttcgccagttccgcaataagctgataaatttcaaattttgcgccgacatcaatgccgcgggtcggttcgtccagcattaatatttccggctgcgttaatagccagcgaccaatgatcaccttttgctgattgccgccggaaagcgaaccaatttgcgtgcgatgccccggcgtttttacccgcatggaatcaatgacccattgggtgtcgcttttcatccgggaattatccagtaaccccactttatttttataattacggatattcgaaattaatgagttaaatccgatatccagataggcgtaaattccggtggaacgacgctcttccgtcaccagcgcaaaaccgtggttaatcgcttcgttcgcagtgtgattattaattttcttgccatgtaaagtgattgtcccggacgacttctcacgaatgccaaacagcgtttcgacgatatcggtacgctttgccccaaccagaccggcaatgcccagaatttcgcccttgtgcaaatcaaaggagacatcgcgaatggaaggctgacgcagcgaggtcaggtgacggacctccagaatcacgtcgcccggcttattttctttatccgggaaacgatggttcagggaacgcccgaccatcatcgcaatgatcttatccatatccagcccttccagcggctgggtggcaatccactgaccgtcgcgcaaaatagtaatttcatcgcacaattgaaaaatttcttccattttatgcgagatataaacaataccgcagccgcgttctttcagcttgcgaataatcgtgaacagatgattaacctctttctcagttaacgatgaggtcggttcatccataataacgatcttagcgttataggaaaacgccttcgcaatttcgatcatctgcatttgcgaaacggataacgttcctacgcgcgcgcgtgggtcaatatcgatatccagttcatcaaatatcgctttggtatcctggtacattttatcctggtcgacaaacatacctttggtgggataacgtcccagccacatgttatccatgaccgaacgttgtaataccaggtttaactcctggtgtaccatcgaaatcccattctccagcgcttctttcgccgaatggaagtccacttcttttccctgaaatacaatgctgccggaatctttttggtaaataccgaaaagacattttaataatgttgatttgcctgcgccgttttcgcccattaatgcatgaatagagtgcggacgaacgtttaagttgacattatcaagcgctttcacgccgggaaatgatttgttaatgccacgcatttccaacaaatattcacccgacggcggagaaatcgtgctgcccataatgataccctgtcggcctttttaattatgactatccgcgccggatggcaaaagaaatacgttatccggtctgcggcgcgtcacccttccacggtttcagggcgcaacaaaattgcgcccacagacggaaaagttatttttgggtaaattcgctcagattgtctttgtccacgccgacataaggcacgcgcacgattttgttctcaatcttccagctggtgccgtcagccgcgcccttgccttcggcgaggtttttcgccagatcgaatgtcgctttcgcctgattgttggcgtcattcagtaccgtaccggccatcgcgcccgatttcaccagcgccagggcttccggtaacgcatcgacgccaaagaccggaatcgacgatttattatgcgctttcagcgcctctaccgcgcccatcgccatcgcatcgttattcgcgataaccacttcaatcttgttagcgttcgggccagacagccaggcatccatcttatcttttgcctgcgcggtatcccacatagcggtgtctaacgccagttgctcggtctgaatacctttatcatttaactctttcaccacatacgtcgtacgggcttcagcatccgggtgccccggctcgcctttcagcagaacatactgaattttaccgtctttattcagatcccaaccctgattcgcctgccagtgtttggcaatcaagtcgccctgaatcacaccggattctttagagtcagtcccgacataatacgccttgtcatagctgtccagcgctttgcgggaaggctctttgttaaagaacaccaccggcacattttgcccgcgcgctttctcaatcaccgtaccggcggctgccgggtcgaccaggttaatcgccagagctttaacccctttcgccaataaaacgtcaatttgatcattctgtttggactgatcgttttgcgagtcattcatcagtagctgaacatccggcgcggatttgccatctttttcaatagccttacgcaccacggacataaagttatcgtcatatttataaatcgtcacgccaatacgagtatcagccgcgtgcgcgtgcgcgccgaataacagacttgccatcacggcagaaagggtcagtaccttcttattcatggtagctccggttttattatgtagggtatagcgtaaaaaaatgcccggctgttcagcacgttaacgcgtgttactgaacgccgaagcgtatttagagcctatcccaccaggcgttattggcgcagccagtttggacacggacagcgcgcaaaaaccggagcgtacacgtagtacgtgaggtttgactcgctacgctcgcccttcgggccgccgctagcggcgttcaaaacgctaacgcgttttggcgagcactgcccaggtccaaaatggcaagtaaaatagccctaatgggataagctcttattcaactctttatttttgtccggtagtcgcgggatattgtgataacggtttttataagcgaaataccccagcaaaactgacaactaactgttacacgttagttacagtgcgacaaacgttgtcatcatagctatcacaatgttaataaactgtgaatttactcacagattgaaaacggttacatgcggtgcgtaatcagttagtgatcagtaccgcattctgtcgccatgccaccgaatggcgccgtaccagggtcggcataaagcagtgcgtcgccgtgatatccagcgtgcctgcggccccctgtaacgccagctcggtcgcgattttcgccatagaagcaataggatagcgcacggtagtcaactgaggatcggtataacgagcaatagggatatcatcgaaaccgatgacagacagatgcaagggaatggcgatgccgttatcttttaacgccgtcagcgcgcccgccgccatgttatcgttataggcaaataccgccgtcagttgcagattgcgtcccagcaactcaaccattgccgactcgccgccctgcatgtccggcgtgccggtgcctatccagctctccgacgcagcaatcccctgctcttgcagcgcgtgtaaccacccttctctgcgcatcgcgtcatcttcaatacggtggctggaggccaggtagccgatgcgttgatgtccattattcagcaacattcgggtcgccattctggcgccgctcacattgtcgagacaaacacaacgatgcgcataacccggcacgatacggttaatcagcaccataccggggatctgatccataaagtcgctcagctcgcgatcggttaaggcttttgagtgaacaatcaatgcgttacaacgctgacggatcaagacttcaatcgcatggcgctctttttccgcctcatgataactgttgccaatgagaacatatttctggtgctgctgcgcgaccagatctacggctttcaccagagcgccgaaaaaggcatcggaaacatccataaccacgacgccgatggtgtcgctcacctgagtggccagcgcttgcgcattcgcatttggccgatatcccagcagggtgacggcctgcataacggcgtcacgggtgtcgggactgaccaacgcgctgttattcagtacgcgggaaacggtcgctacagacacgccagcctggcgcgctacatcacgaatggtgatcatattcactgccctgtttgagttcaaaaatgctcacaaatgccccgttagcaggcggctattttgtcagcaccctgcccagggctgcgtgagaaacatcacagggatggaaacggttacagccattttgttaatgaatgtgatccagatcgttatctgagcgatcctgacgcgcgcaacgtgagttgacgccataaccactcgaccggtccctgtcgccagaaacgtagccagatgacggaaaagagaaggtttattgcccataccggaacgacaaagaacaagagttccagtcgattgaatttcataaataagccaaactgataaaacagcgtggtacagatgatcgtctgcagcagataattggtcagcgccattcgccctacgcaggcaatggcaagcgtcagtctgcatcggctaagctgcggccagaagccaaacatcagcgcggcatagcccagcgtttgcaacggcgcgctcagttcgcgcggcgcctgcaataagaaggcgcaccagcggtacgcccagtccagccgccattgtaagatgaccgcaggcaggttgatcattagccctaacgccaccagcagagccccggtacggcgatagtgccgcagactgtactgacctttcagccagccgctacgcattagcgcagcgcccagcagcatcatacccgccagttgccagccatactgcgcgccgagcgccagtaaactattcgacagcatctctgcccggttgctgatagcctccatgccgccattcagcttccagtatttttcatacaatattgccgacgcatccggcgtccaggcgcggctggtttcgctactcgataccacgcccagcagcagtagcacgccaatcccgaccagataaaggagtatgccggtattgaacaggctttttaccgaaggcgcatcgcgtatcagtcgccagcaaattaacccgaccagaccgtaggccagcagaatgtcgccgtcccaaaagaataacgcatggataaaacctaacagtaccaatagcgttaagcgcgactgaatccactgtttaccacgcggaagcagcatttgtagccccgcgccaaacaacaacgcgaacagcgtaagaaacttagcctgcgccacaatatcgagaatcgcccaggaccaggcgtcttcgggaacgatcgcgccgtaccaggcgggattgagataagccgccttcggcaatccaaaggcgctaatgttaagaagcaggataccgaggatagcgacgccacgtacaaaatccagcgtgacattacgctccatcgtctccaccttaatcatggatgatggcgaacggcacgcagaaactcctggcgcgtattctggctggacttaaacaatccgcccagcgacgtcgtcgtcgtggcgctggttgcgtcacgaataccgcgcgctttcacgcagtaatgcaccgcatcaatcgataccgctacattattggtgccgagcaaggtttgcagcgccgtcagaatttgttgggtcaaacgttcctgaacctgcggacgctgggcgaagaattgcacgatgcggttaattttcgacaggccgatcacggaatctttggggatatacgcgacggtcgctttgccatcaatggtcacgaagtgatgttcacaggtgctggtcagcgtgatatcgcggacggtgaccatttcatccaccttcattttattttcaatgagggtaattttcgggaaattggcatagtcgaggccggcgaaaatctcgtcaacgtacatcttagcgatacgatgcggcgtttccatcagactgtcatcgctcaaatcgagattcagcaactgcataatctcagtcatatgccctgcgataaggctttttcgcgtttcattatccagttcatccataggcgggcgcagcggcgtttccagcccccgggcaaccagcgcgtcatgaaccagggccgcttctttactgagtgatggcattaatcgtgttctcctgcaggtgtggcgcctctgccctgcatggggcaaagtttgtcaatattgtgacagtgtgattattgtgcgtgaggtagcgcacataatccagtattcacgcccataattgttgaaattgtcgctgcctttcatgacatctgttccggtgcgaaaatgatggcaggacaaagggcatatttgttaacgcaacgttatttaaatgatgaagcatgtttatgtattacggaagtgaaagttactcacaacgcggtgaataatctgtattatgaagaatctgcataccttatcaggttcactataaaaggagcccccgcatggaaatgctcgaagagcaccgatgttttggcggctggcagcagcgctggcgtcatcatgccgccacgctaaactgcgccatgacattcagcatttttcttccgccgactcaggataatgaaccgcctccggtactgtactggttgtctgggttgacctgcaatgatgagaactttaccaccaaagcaggcgcgcagcgtatcgcagcagaactgggcattgtattggtgatgccggataccagtccacgcggtgaacaggtcgccgacgatagcggatacgatttaggccacggcgccgggttttatctcaatgccacacagccgccctgggccagccattatcgcatgtacgattacctgcgcgatgagcttccggcgcttatccagacacagtttaacgtcagcgaccgttgcgccatcagcgggcactcgatgggcggccacggcgcattaatcatggcgctgaaaaatccgggcaaatacaccagcgtctctgcttttgcgcctatcgtcaaccccagccgcgtgccgtggggaatcaaagcgcttaccgcttatctcggcgaagatgaatcagcctggactgagtgggatagctgcgaattaatgctggccagccagccgcaggacgccattcctgtgctcatcgatcagggcgacagcgatcaattcctcgccgatcagcttcagcccgccgtactggcggaagccgcgcggcaaaccgcctggccgatgacgctaagaatccagcctggctacgatcatagctattattttattgcgtccttcattgaggaccatctgcgctttcatgcccggtatttacgggacgagcgtgagacgtcaccaacataatgaattttccagcgccgcgctgtaattcacctcctccgactgcggcgcggaagatttattatttaaatccgcggcctgctggcgtacctgaaggcggccgctgccctctccgccttcataactttcgtgaaaattacgcagctcggattcaaacagcaccgcatcaagattatgcaacttatccagcgcccgcaggagagaaattaacgtatcaagattgagccctcctcccttctcgatacgcttgatggtggcaatgccaacgtgcgcgcgatcggcaagctgctgctgggtcatcgaaagagacagacgcgtctcctttaagcgggcgcacaacgacaggataatctcgtcgttattcatcgtattgtatttcacgctgttaccctctcttgcgcggctgaattttccccagcgaaccatgatacgtttcacggtatttagcgctcatgtctttaccggtctcgtacatcgcagcaatgatctcatcgagcgaaatacagggttcgcttacgcgactcatcgccatcgtcgccgcgtttatcgctttcacggcagagatagcatttctctctatgcagggaatttgtacctgtccgcccagcggatcgcaggtcaatcccagatgatgttccatggcaatttcagcggcgctcagcgtttgctccacggatgcgcccattagttcagccaggcccgccgccgccattgagcacgccacgccgatttccccctgacagccaacttcagatcccagaatagaggcgttttgtttaaacaacatcgcgatagcggcggcggtcaggaagaaacgggtcagagcaccgggctccagcggcgtgacaaatttatcataccagcaaagcgctgccggaatgatgccgcacgcaccattggttggcgcggtaacaatctgtccgccgctggcattttcttcgcttaccgcaatcgcgaaggcattgacccagttcagcgcggttaaaaaatcgctggcggagcgattagcctgtaacgtcttatgtaacgcgcaggcgcgccgcggtacctgataggggccgggtaataccccctcagtatgcaggccgcgataaaccgcctgctgcatcacgtcccatatttgcgccagataattctgcaacgtctgtggcgagtggcggcacagctcatttttcatcatcagcgccgccacggacaggccgttacgccgacacagcgccagcaactgcgcggcatgactaaattcaaagggcgacactgtacgcaaaggaagcgatggcgtcagcggctcgccatgtttgcgaacctgtccggcgccggtcgaaaaccaggtctcttcatacaccgtgaaataatcatctctggcgcgaaacgtcatggcataaggatggcctggatgcgcctggtgattggcgataatcttgacttttatcgtgattccgcccgcgtcggagagcgggagttcgattttgttttcattttccgcacgcttaatcaccgccatatacgaacggagatcgacattctccggctggcaacccagcagcccaagataaagggcggtatccacattgtggcacttgcggcttaacgataacgcgccatacagctcgatttcaatttcccgaattagcggtaacgtctcttgttctctgagcaatgaaataaagtgacaggcggcgcgcatcggccctacggtacgtgagctggatggacctattactattttgaatatatcaaggcaactctccatcgttatatcaatcctttcagtgtcattcgcgttcagtaataaataacatcctcgcacagttggcatatcaaaagtgataccttttgtgtctgaactttacctggtatcaaaaacaacgcttttttagcccttttctggctgtgatatctgtgatagcacgagattccacgccgcaaaagagccattataatacccgtaaattaagggagttatcatatgagcattatttattttattactacacaggatatcgatacgtttcagaaaaaattacaggaaacgttatttaatgccgtcaccatgccgtttccgctattatttgataaacgttatgccgcgcttatcaataccgcttatttaaagcttacgctgccagcggaatgtctgacgcctgaattttatcgctatttacgcgaactctcattgcaatggcagtttgatttttttattaagccgcagccactgcctgctaacggtattatcgcgtttgatatggactcgacatttattgcggaagaaggcgtggatgaaattgcccgcgagcttggcatgtcgacgcaaatcaccgccattacccaacaggcgatggagggcaagcttgattttaacgccagttttacccgacgtatcggaatgttgaaaggcacaccgaaagcagtgctgaacgccgtatgcgatcgcatgaccctttcgccaggcctgttaactattctgccagtcatcaaggccaaaggatttaaaaccgcgattatctccgggggactggatatattcacccagcgtctaaaagaacggtatcaactggattatgccttttcgaatacggttgaaatacgcgataacgttctgacggataacattaccttgccgattatgaacgccgcaaacaaaaaacagacgctggttgacctggctgcccggttaaatattgccacggagaatattattgcctgcggtgatggcgccaacgatctgccgatgttagaacatgctggcaccggtattgcctggaaagcgaagccggttgtacggaaaaaaatccaccatcagattaattatcacggtttcgaattgcttctttttcttattgaagatgaattataacgcgactcacctcgccggaagggaattttaaaatgagtataaaaacatttattttcagccagcccgataagccgattgtaaaagagaaaaaagagatagaccagacctataaaaaatttcgttttgagattatcgcctcggtctttatctcttatgccgtcttttatcttacccgtaaaaacttctccgccgcgatgccggccatgctgacggaaacgtcgctgaccgcagaagacttcgccattatgtcttctattttttacattctttatggcgcgatgaagtttgtcggcgggatgctggtcgataaaattaacccgaaagccatgaccggcccggtgctgattggcgtggggattgtaaatattctgttcggcttttccgacagcgtggcggcattctacgtgctgtacagtctcaacgcgatattacagggcaccagctttccgccgatggcgaaaattatggcctcgtggttttcgaaaaacgaacggggacgctggtgggctatcgttgaagcggcgcacaatatcggcggcagcctcgcgccgctgctgaccagttttgctatcgcctttagcggtagctggaaaatgggattttatgttcccggcgccatttcgctgctgatggggatagtggcgctatttaccattaaagatcgtcccggtacgttaggtttgcccaacgtggggcagtggcgtaacgacccgacggaactggcccaggtcaaggccagcccggtcaacctgagcttctggcagatttttgtgaaatatatcctgaccaatccactggtatggatcattattatcggtgatatgtcggtttatattgcgcgcactatccttaacgactggccgcagatttactattcgcaggttcacggctggagcctgataaaagcgaactcgattatttcctggtttgaggcgggcggactggcaggtgggttgctggcaggctacttgtctgactttatgttcaaaagtaaccgctggatgaccggattaatcttcgcgttagcgctgtgcatatgcatcgtgctggtgccgctggttcaggatacctcttacaccctcaccgcgattctgttcaccatcatgggcttcgccttatacggaccgcatatgctttttgccgtcggctgtctggatgtgacccataaggatgcggcgggatcgattaccggctttcggggattgttcagctatgtcggcgcggcaatggccggtgtgccggtaattatggtgaaaaatagctgggcgtggtcgggcgtttatatctatgcggtgatcgccattctgctaacgactctgtcgctggcgctgctctccaggctgcatcggttataacattctggcgacagcggcaaaacgcggctgtcgccagtctctgtcagaaacggtaatccaccgccataaagtaacgacgtccgtcttcggtataaccgtagtcgtcgcgtttgagatctttatcgcccacgttcagaacgcccgcacgcagtttaacgtttttcgtcgcctgccatgccgcgccggtatcccagaccacgtacccgcccggcgttttcgctgttgcgctgtcggcccgcttacgcccggtataattccctgatacgtagaatgaccagtcttcgagctgcaccggtttccagtccagcgtaccgttcgcggtgtggaacggcagatcggaaagcggcttgttcccgccattactgacgtcgcgcccgtcgttataggtgtaattcaacgacagtttccacgcctcgttaaacggaactttcaactcggtttccacgccctgaatacgcgctttattcacgttgtaataacggaagaccggaacgcgctgtccccgactgttggtttcgaaaccgacaaagttggaatagccgggcgcggcgttaacgtcaggggtacggctaatgctgatgcgattgtccacatcgttacggaacgtggtaacgctcgcttccacgccctccagtatgccttcttcgccccggtaataaaggccgagctcccagctttcactggtttcaggtttcagatccgggctaccgacaatgcggcatccgccacggcaggagttggtcgcccagtccgggcttaattgcaatagcgacggcgctttaaaggccgtggcccacccacctttcaccgtcagggtatccgttgcgttatagaccagataagcacgcgggctccagtgatcgccataggtttcatggtcatccatacgaataccggtggtcagcgccagcggttcgaagatgcgccactcatcttcaaggaacagagcgtactggctggcggaggttttagtactggaaccgccggtcaggttcaccgcatcgctcagtttatcgtgacgccattcgccgccgaaggtgaggaactggttgacagacgctaacggcagaacgtatttcccgtcaatcgaattgctttctgacgtgatagggctactgttgccggggtttttgttttccactttttcgccgtagaatttgagctcactattgccgagatcccaacgtccgttatggctcaacgcatagttttgccgttccagacggtttttatccagcgagtctgagtcccggtcctggcgatcaaaaccgtagcctgcggtaacgtcatgattttcgtttggtgtccaggcaaactcgacgtttccatcccggctggtaaatccttcaatgcgcggcgtttcacccgtagcggtggtggcggaactctgctgctcgtctttttcgcgtttcgccaggctaccgtaggctttcattcccagcacgccgtcgatcagcggaccgctggtaaagaactgaccgttataagtatcgccacggtcgcgatgttcctgaatagtggagtcaaccgtgacgctgccgtgccatttctgaccaatttttttggtgataatgttgaccacgccgcccagcgcatcggagccatacagcgaggacatggggccacgcaccacttcaatacgttcgatagcgtcaaccggtatccagttcagatcaaaatcattatggcggaagaccgcgttacgggagttaacgcgcttaccgtcgatcaggatcagcgtataactgctgtccagaccacgaatactcacgcctttacggttatccccttcgttagtgagctgtacgcccggcacctctttcaggacatctttcaggttttgcacgggcctgcgctgtaaatcttgctgggtaatgacgctgatacttgctggcgcatctttcagattttgttcgatggcggacgcggtaacgaccatggtttcaccatcatccgttgccgcggcaaccggccaggccaacgtaactgcggacatacaaagccctacccgaacgaaagggttaaacctaaacattccatttctccatgaggtaaatacgacaaaaaaatcggttatcgctcacaacgcattacgtttcgcctgcgataacggttatcacggcgaactctttttatgcaggcgagtcgggctcatgagtgacggtcgcgcccgaatcttcatcctttctgatttcgagcgtaacgataaagcaaacgataataattatcaatttaattgttaataattatgtcatttgaaccaatcatgaagaaaaaacaaaaaaccctctcgaatgagagggttagaagagtcaggttcaggcagtcagtgccggatagcggcataaagcctatccggcctatgacgagaataccgcgttactttttaacgcgttccgggaagtgcatttcgctatagcgcacgaaatgcgtaccttttatcagcttgtagccgaaccagataagcaggaacagcggaataccgatataggtcgccgcgacgccgccccagtcgatggtatctttcaggaacgcttcatagttctgccccaacgtaataatcaggcacagtacaaaggcgaaaatcggccccagcgggaagaacccggaacggtacggcaaatcattcacatcatacccttgtaacacgtaaccgcgacggaagcgataatggctaatggcaatccccagccaggcgatgaagcccgtcataccggaggtgtttaacagccacagatagaccgtctggttgccaaacattgaggtcaaaaagcaaagaccggcaatcacggtggtggcataaagcgcattgcgcggtacgccgccgcgggacaatttcgcaaaaatacgcggggccttaccgtcacaggccagggtgtagagcatacgggtcgaggcatacatcccggagttacccgcagacagtaccgccgtcaggataaccgcattcattatcgccgccgcagacaacaagcccgcatgctggaacactaaggtaaacggactgacgctaatgtctttgacgtcgttacgcagcaggtttggatcggtataaggaatgatcaggctgataatcaaaatcgcgaaaacataaaacagcagaatacgccagaacacctgacgcaccgcgcgtggaatattcttctccgggttttcagattccccggcggcaataccaatcagctcagttccctggaaagagaagcccacgatcatcgcgacgccaatcattgccgcaaaaccgccagcgaaaggcgcatcgcccgtcgtccagttgctccagccgaccggctcgacacctttaaaaatgccgataatcatcgctacgccaacgatgatgaagataataacggtcgcgactttaattaacgagaaccagtactccgcctcgccaaaaccgcgtacagaaatgtagttcagcaagaaaatgacacagaggaatagcgcgctccagatccagcccggcgtgtccgggaaccaccagcccatcaccaattgcgcggcaaccaggtcaacagcgatagtcaccgcccagttgtaccagtagttccagcccagcgcgaaaccaaagccttcttccacatagttctgaccatatgtcgcaaacgagccagatactggcatataggccgccagctcgccaagactggtcatcaggaagtagaccatcaaaccaatcagaatataagaaaacagcgcgccgcctggccccgcctgagaaattgtcgcaccagatgcaacgaaaagacctgtcccgatggagccgccaatggcaatcatcgtcaggtgacgctcctttaattcgcgacgtagcgcgggcgcttctgtggttttagttttggaacccatgtgaaaatgctatccatccaaaaaatgaggcgcgattgtaacagacgaaatactatccttccgacacaaatgcgcggttataagagaccttcatgaccggccacggattataagtaaagcagagaataacgtatacgtaagcggatactaaaaatggcgatgccgcccgggcagccctcctcttcacctttattcacagtaactcaaaaaacgctgcaacgcgttagaaagatgtttctgccgatgatgaacacgccacaacgtgcgcaccaggcgcggtaacggcaccgcgacttcgcccagggttcccgcctggagttgttcagcaatcacccggcgcgataaacaacttatccccagtccatgacgcaccgcatgtttgatcgcttctgaattccccaactccatcgccatatgaaagcgcggcaaatgcgacaacagcaaataatcgacaatttcccgcgtaccggaaccgcgctcgcgtaaaatccatggggatgccgcaagctgttccagcgtcaccggcccctgcgtcagcggcgaggacggcgcggcaaagaccaccagctcatcttccagccacggctcagagataatctctgtactgtgacatggtccttcaatcaggccgatatcaacccgaaaatccagcaccgcgttaatcacgtcctggctgtttcccacgctgagttccagcggcaaggccggataatgctggcgatagcgggcaatcatagcgggtaaaatgtaattgccgatggtgctactggcataaacccgtatcgcgccgttatcttcacgaaatagctgctcaatttctatcgcttgctccagcaatgccagcgcgcgcgggtataacaagcgcccatgttcgttgaccaccagccgtttccccacccgatcaaacaactgtacgccgagctgaccttccagatcggtgagcgcggcgctaacggcggactgcgataatgacagcatgaccgacgcctgggttgttgaaccgcttttcagtacttcagcaaacacttcaagttgtcgtagcgtaatatgcatagtcgtatcccaccgatagcgtttcacttaccacttataaagattaattataaatatataatcaattttatttttaaaccagatcaccgtaaccttattgtccatatacaggagaaggttatgacagaactcaccttgcagaatcatcgtcgtacaatgtggcattttataccggggctcgctctgagcgccgtcattacaggagtcgccctgtggggcggcgctatccctgccgttgcaggcgcggggttcagcgccctgaccctggctatcctgctgggtatggttatcgggaataccatctatccacaaatatggaaacaatgcgacggcggcgtgctgtttgcaaaacaacatctgctgcgtttagggattatcctttacggcttccgccttaccttttcacaaatcgccgacgtgggcattagcggcattgtgattgacgtattaacgctttccagcacgttcatgctggcctgcttcttaggccaaaaagtctttggtctggacaggcacaccagctggctgattggcgccggtagcagtatctgcggcgcggcggcggtactggcgacagaaccggtggtaaaagcggaagccagtaaggttactgtagccgtcgcgactgtcgttattttcggcaccatcgctattttcctttacccggcaatgtatccgctgctggcgcactggttcagcccggaaacttacggcatctatatcggctcaaccatgcatgaagtcgcgcaagtggtcgcagcgggtcatgccgttagcccggatgcggaaaatgcggcagttatcgctaagatgctgcgtgtcatgatgctggcgccgttcctgatcattctggcggcacgcgttaaacagctttcaccggcgaccggcgcggaaaaaagcaaaattaccattccgtggtttgctattttcttcatcgtagtggcgatcttcaactctttccacctgctgccgaaagccgtggtggatatgctggtgacgctggacacggtgctgctggcgatggcgatggcggcgttgggtctgaccactcacgttagcgcattgaaaaaagcgggggcgaaaccgctgctgatggcgctggcattattcgcctggctgattattggcggtggcgccattaacgtcctaatccatagccttatcgcataaattattacgtttcacgcctgttaacccgttatcatagcgttcgtaatgaaccgttagcgggtttaacaggagtcttttatgaaatacatcggagcgcacgtcagcgctgctggcggtctggctaacgcccctgcccgcgcggctgaaattggcgcaacggcctttgcgcttttcacaaaaaaccagcgtcagtggcgtgccgccccccttactccccaggtcattgatgactttaaaatcgcctgtgaaaagtatcatttctcggcggcgcaaatccttccccacgatagttacctgattaatctgggccatccggtcagtgaagcgctggaaaaatcacgcgatgcctttctcgatgaaatgcagcgctgtgaacaactcggcttaaccttgcttaattttcatcccggtagccatctgatgcagattgcacaggaggattgcctggcgcggatcgcggaatccatcaatattgccctcgcgcagaccgagggcgttacggcggttatcgaaaatacagccggtcagggcagtaatctggggtttgagtttgaacagttagccgccatcatcgacggcgtggaagataagtcgcgcgttggcgtctgtatcgatacctgccatgcctttgccgccggatacgatctgcgtacgccagaggcgtgcgaaaaaacattcgccgaattcgggaaaattgtcggatttcagtatttgcgcggaatgcacctgaacgacgccaaaagcgccttcggtagccgcgttgaccgccatcacagtctgggtgaaggcaatatcggccacgatgcgtttcgttggattatgcaggatgggcgttttgacggtattccgctgatactggagaccatcaatcctgatatctgggcggaagagattgcgtggttaaaagcccagcaaattgccgaagcgatggcctgacgctcaatgttcttcaggcaataaaaaaggcagagcgcgctctgccttttttagcgtgtttctcttatgccgcttttgccgtgacttccgtctccggacgtttcaggacggcataagccagccctgccaccagcgtaccggccacaattgccagcaggtatcccaataccggcgtaattgcgcctgggataagcagaacaaacagaccgccatgcggcgccatcaattttgcgcctaccgccatagaaatggccccggtcaacgcgccgccaacgatacagcacggcagtacacgcatcgggtcgcgtgccgcaaacggaatagcgccttcagtgataaagcacagccccagcaccaacgccgctttaccgccttcctgctgcgctttgtcgaacttacggcgcgccaccatcgtcgccagacccagcgctaacggcggtaccatacctgcggccatgatcgccgccatcggcgcgtaagtttgcgtactcagcagaccaacaccaaacgcatacgccgctttgttcaccgggccacccatgtcggtacacatcatcccgccgagaatcgcgcccagcagcaccgcgtttaccgtccccatggtttgcagccagtgggtgagcccttccagaatcccggcaaccggtttaccgatcaggtaaatcatcgccagccccaccaccagactggaaattaacgggatgatcaggattggcttcagcgcttccatactttgcggaagtttcagtttggtactgataagcttcgccatatacccggcaaggaagccggcaatgatcccgccgataaaaccggaaccggtgctaaccgccagcataccgccaatcagacctggcgtaaggcctgggcgatccgcgatggagaaagcgatatagcccgccagtaccggcaccatcagcgcaaacgccgaaccgccgccaatctgcatcagcgccgccgccagcgtgtccggcaccttaaaggcttcaataccaaaggcgaaggaaagcgcaatacacagtcccccggcaaccaccataggcagcatgtaagaaacgcccgtcaacagatgccggtatgcgccagcgctctctttcttcccttcggtcgccgcttgcgatgccttacccgccggttgatacggcgtcgcttccgctacggctttatccagctcctgcgccgtctttttcagcgccaggccggtcgacgtgcggtacatcgggagaccggcaaacttcgccagatccacttcgatatccgccgccacaatcactaaatccgcttccgccacctcttccggggtgatggcattgccggcccccacggagccgcgcgtttcgacttttacccaccagccgcgttttttcgcttccgtttcaatggcttcagccgccataaaagtatgggcgacgccggtcgggcaggccgttaccgcgaccacgcgtttcggaccgccgctcgccgcaggaacagccgcagcaggggcgctgtaaggggtcgcatggcttttggcttcactcagaaacagttccggatgcgcgacggcgcgaccaatatcccccagccaaacctttttgccgttcagagcattgtcgttcggcagagattcgcccagcacgatcgccagctcagcatcattcggattgtcgataatttccagatttgctttatgcgccgccgctccaagcagggttttcgccatgtaagcgcgagcctggccgagattagcgtcaattatcagcagcgttttcattatgcctctcctgctgtcagttaaacggttgtaagtcgacacgcgccatcattgcggccaactgaggacgatcggtaatacccacattgctctggctgaccgccagcgcggcaaccgccgtcgccagacgcagcgtatgttcgctggactcgcgcatcagcaggccgtaaatcaatccgccaaccatggaatcgcctgcgccgacggtacttaccacgtcaaccgccggtggtttagcgatccattctcctgaggcgttaacccacagcgcgccttccgcccccagcgaaatcaccacatgggcgataccctgttcgcgtaacgcgtgcgccgcatcaatcacatctttcatttccgggagcttacgacccgcccaaatttccagttcgcggcgattcggtttcaccagccacggcgcagctttaagaccggcgactaacgcttcacggctactatcaaagataatgcatggacactggctgcgcagacgcgtcatccagtcggtgaacgcttccggactcacgccagccggtaagctaccgctgacgcagaccatatcgaactgacccagccagctcagggagtcgttaacaaagcgttcccagtctgcgggagtcacgtcaaagccggaaaagttgaagtcggtcacttcgccatctttttccgtcagcttcacgttgatgcgggtccggccctgaaccacctgaaagcggttagcgatacccagttcgctgaacaattgctgaaaaccgtcctggttatctttaccgagaaaaccgccgacggtgacgtcgatgcctaagtctttcagcactttggcaacgttaatgcctttgcccgccgcgtgcagacccgtggttttcaccaggttcacttcgccgcgttcgatttcagggcaaaacccaaccagatcgtaagccggattaagggtaatggtggcaacacgcctgctcattatgcgccctccccgagaccggcggcgatcgcatcgccaatcgctttcagcgcctgttcagcatcttcaccctgcgcggtaaagcgcagacgatggcctttcttcacgcctaacgccaccactttcatcagactacgtccgtttgccggtttgccggttccatcaaggtttgtcacggtaatttcactgttaaattgtttaatcgtattcaccagcatggtgcccggacgggcatggagaccatgctcattacgcactacaaattccgcgctcagtacgtcatccgtcagcgcatcatcactggtcagcaacgccagcagcgtcgcggcgtcagcgctcagcagacgatcggctttattgttcagcaacaggtcgccgaggcgttttagcacggcaatcggctgctcatcgttcatcgcgacagtgactaataaggctgctttttcaccctctacgtcaaacgcctgggtcgcacggcttaccgcaacagcgctgcgcaaattgccttccgcgctgtcgttcagccagatgccttgtcccagattcatcggactatcgttaatcgtttttgcgacgaacgccgcatcaaccgctcccgcctctttcagacgcgccgcatttagcgcctgcaatgtgaccagcgagctggcgatgacatccagcgtcatcgtctcgttatcaagttttaattgttcactttgcttctcgcccatcagcaatgcgcgcagctcttccgccgttgtcgcggatttcagctgttcagccacggagtcatcgcttagcacatgcgtcagctgacgcagcaggccgaggtgttcgtccgaactggcggcaataccaatcgccacgtaggcgacctggccttctccccaggtaacgccctgcgggaattgaaagacctggacgccggttttcagcacctgatcgcgcgtgtctgttgtgccatggggaatcgcaataccattgccaagaaaggtcgaggtttgctgttcgcgcgccagcataccgtcaacatagccgcccgccacattccccgcctgcgctaacgcggcggcgatttgccgaatggcctcttctttatttccggcctgctcgcccggatgaatgtcctgaaccgataactggaacatgtgtctcctctcctgctgaattgaaacgattcagccgctatgagaaaaaaagcgccaatctgagttatcaaaaaaaccagatcgcgctgaaacgtttcaagaagtctggatctttctgcttcagcacgcaagaaaagttaccggttttgtagcaattttttgaggtgaagcacattttttctccaacagaccctcaatagctgacgcataaaaggcttcagcttttttctttcagcttgcgtcagcacgccctggtaacaaactggaatgctattttgatttttcgtgtcgattttgattcagacgcctgtttattttctgacgggcagcgtaaactccgcctctcttcacaccactgatatagaaacatgcacaacagtcccgccgccgctgcgcctaaatcgtttgacctgacgtctaccgcctttttgatcgtcgcttttctcaccggtattgccggtgcgttacagacgccgacgctcagtatttttctgacggatgaggttcacgcccgtcccggcatggtgggtttcttttttaccggcagcgcggttatcggcattatcgtgagccagtttctggcgggtcgctcagataaaaaaggcgatcgcaaaaaactgatcgttttctgttgcgtgctgggcatgttggcctgcgtgttgtttgcctggaaccgcaactactttattttgctgttcatcggcgtctttctcagtagcttcggctctaccgccaacccgcagatgtttgcgctcgcccgtgaacatgccgatcgtacaggtcgtgaagcggtgatgttcagctcaatcctccgcgcccaggtctcattggcctgggtcattgggccgccgctggcctatgcgctggcgatgggttttagctttacggtgatgtatttgagcgcggcggtagcttttatcgtctgcggcgtcatggtgtggttctttttaccgtcaatgcgcaaagatgcgccgctggcaaccggcacgctggaagcaccgcgtcgtaatcgccgcgatacgctgttgctgtttgtcatctgtacgttaatgtggggaactaacagcctgtatatcattaatatgccgctgtttatcatcaatgagctgcatcttccggaaaaacttgcaggcgtgatgatgggcaccgccgccgggctggagattcccacaatgctgattgcaggttacttcgccaaacggttgggaaaacgcctgttaatgtgcatcgccgttgtcgccggactgtgcttttatgtgggtatgttgctggcgcacgcaccggcgacgttgctcggcttgcagttgctgaacgcgatttacatcggcattcttggcgggattggcatgctctattttcaggatctcatgccaggccaggcgggttcagccaccacgctgtataccaataccattcgcgtcggctggatcattgccggttcgctggcgggaatcgccgcagaaatctggaattaccatgcggtcttctggtttgcgttagtcatgattgtcgccaccatgttctgcctggcgcgtattaaagatgtttaacttgcaagcctgatacttttactcttcgacacatttcagcgcagagtttatctctgcgcaatgttcatgcgcggtcattcattgtctttttctcaatacgatattctgttagcgccctcttacataagagaccggttattgagaaaattacgcccatcagtccgcaaagaaccaacaccagccgcatcttatattttggtgtgacagcaacatctatcacttcaatgttagcattatttttaaccgcctccgacaacaaggatagctttgcatatgtttccgtttgtaacatatttttatgcacgctataacgtttaatgtcaccatcatcgatataccatgccgccattttatcgacactatttttcagggtggaaataatattattgacgctttcttccctcccctgcgccttaaaaagaacaagctgatttttcgcgtcaaaacttattttatttttatattccgcaggcaagaaacggctaaactggttaaggataaccgttgttttacattgaatatcattagtatagccacataacgcataggtagcaggcgtatccagattaggtttgattgtcatactcacaacctttgtatcatgctgcacgctcacaaaaacatagccaatggcaacaaaaataaaggtagcgatcatgatacttagccattttcttataaggaataaggaaacgtcgactaaatcaatttcactattttctccccgcatttcacatcccttttaaaacgctaatagtcaacccgaatactgaaataacaaaaagcaacaccagcgtaaaaataaacgccctggctgcgaacgtatatttcttcataagataaaacccacacataagaattcgagtattttaaaggaaaataacaatacattcacactggttatatcgatcggtaaatacatcaatgatagatataaactatcaaattcatgatatcgatcgttataaataattaaaatcgatcaaaattcctctttttaatagataaaaactatcatataaataaaattgatcgtttttgttttatgtgacggttcattcggtacacgttcaggcaccaacggggttgagcggcgacatctaccgcttcagaagccacgaaataagggaatcatgtattacgctatttaatggtaaaaggaggtaatttgaggcgcagcttttgcagactatttcgggatataacgtaagcccctgcacgtttatcaaaaacggcatagctcatggtaaggttttctgttcgagttccagcaaataaataatggcctcttcccgggtcgttaaacacatgtcccctgtcggttgcaaaccagagcacacttttgggcgtaaaggcgagccaaagataaggcacaagttatcttccgaaagctgcacgcatctggtattcatcggcttgccatacggcattccgggtatcggcgacgaaattgaaggcgcaatacagcaagcgccacaaccgctacgacagtccatgctcagccctctatttataaccaaatgaaagataacagaatttgtccaaagaaaaatccagatttaaaatgtggacgtcatcatgatcagacctgccctcagacattccgaagacaaggctggaaacagaagggacaacacagcacacttcccccctccgggcgacatgccatcgcgtattctcgttgaacgcggggcggaaagcgggcgaacagtatcaccttttttgcaccagcaaaagtgacaattccacttgcctggatggcccggcgcgagtagttttacgcgatattttagataatctctacaacaggatctcctcgatgccaagagcgaacgaaatcaaaaaaggtatggtactgaactacaacggcaaattgctgattgtgaaagatatcgacattcagtcgcctaccgcccgtggcgccgccacactgtataaaatgcgtttttccgatgtccgcaccggtctgaaagtggaagaacgtttcaaaggcgacgatatcgttgataccgtcaccctgagccgtcgcggcgttgacttttcttatgtcgatggcaacgaatatgtgttcatggataaagaagactatacgccgtataccttcaccaaagatcagattgaagaagagttgctgtttatgcctgaaggcggaatgccggatatgcaggttctgacctgggacggccaactgctggcgctagagcttccgcagaccgtggatctggaaatcgtcgaaaccgcgccgggtattaaaggagcgtccgccagcgcacgtaacaaacccgcgacattaagcaccggtctggtgattcaggttcccgaatacctgagcgcaggtgagaaaatccgcattcatatcgaagagcgccgttatatggggcgcgcggattaagtttcacatttttcggctgcgccccagggcgcagtctgccccttttatttattgactgttctgcaccaggcaagagaaacgttaaaaatttaacattttctgctcttaagatggcagcagcacgacttcgtcaactcagcacttctctttttcacgtttattcgccaggattattaaaagttgttatgttgtatcaatatcctggagctgacgtgaccaaaaccaatcttattactggatttctcggtagcggaaaaaccacctctatccttcatttattagctcataaagatccggctgaaaagtgggccgtcctggttaatgaatttggtgaagtgggtattgacggcgcgctgcttgccgacagcggcgcactgctaaaagagatccccggcggctgcatgtgctgcgtcaatggattgcctatgcaggtggggctcaacacgctgctgcgccagggcaaacctgaccggttgctgattgaaccaaccggactggggcacccaaaacagattctggatttattaactgcgccggtttatgagccgtggattgatttacgcgccacgctctgcatccttgaccctcgtctgctactggaccaacagagtgtcgccaatgaaaatttccgcgatcagctcgcctcagccgatattatcatcgccaataagaccgatcgcgccacggcgcagagcgatgccgccctgcaacagtggtggcgacagtacggcggcgatcgtcaactgattcatgccgaacatggacagatagacggtaagcttctggatttaccgcgacaaaatctggcggaactgccggccagcgccgcgcattctcacactcatgccagtaaaaaaggactcgccgcgctaaatctgcccgcccagcagcgctggcgacgcagcctcaatagcggacaaggtcatcaggcctgcggctggattttcgatgccgataccgtgtttgacaccattggcctcctcgaatgggcgcgtctggcgccggtgggccgggtgaaaggcgttatgcgcatacaagaggggctggtacgcatcaatcgccagggcgatgacctgcacatcgaaacacagagtgtcgcgccgccggacagccgggttgaacttatctcaaacacagaaaccgactggaatacgttacagacggccttgttgaagcttcgtttagcgacgcacgcgtaaggttgccaccgtttaaaaactatggcgaaatgacgatgaaaacccgctattccttgataattctgcttaatgccgccggtctggcgctgtttttgtcatggtatcttcccgtcaatcacggcttctggttcaccattgattccggcatattccacttctttaaccagaaactggtggaaagccacgcgttcctctggtgggtcgctattaccaataatcgggcgtttgacggctgttcgctgctggcgatgggcggactgatgctcagtttctggctaaaagaaaacgcatcgggccggcggcgcattgtgataatcggattggtcatgctactaacagcggtggtgcttaaccaactcggtcaggcgctgatccccgtcaagcgcgccagcccaacgctctcttttgagcatatttatcgcgtcagcgagttgctgcacatcccgacaaaagacgcgtcaaaagacagtttcccaggcgatcacggtatgatgctgctgatattttccgcctttatgctgcgttatttcggcaaaactgcggggattatcgcccttattatatttgtggttttcgcgtttccgcgcgttatgattggcgctcactggttcaccgatattgtggtcgggtcgctcacggttattttgattggcctcccctggtggctgatgaccccgctcagcgaccgggcgatagcgctttttgagaattatctcccgggcggaaataaacaaattttaaacaaataacctatgtaattaacattaccttcagcgatagttttacatcgttgaaggtaatttatgatgatattcccccagcccatcatttttcggtcatattattcctctgcaaaatgaacagtttgcccgatttttaaacgatttgcgcttaatttgacccgtgctgatagttcactttttgtatcataaattcttataaaaaatcacgcgaaatcgctcgcaatgacagcaacaatcgggtaatctcaaactcgttttgcctcgccagataattattctcattgcgaataaatttgtgcgttccgccacagatttgtgcacaaagaattgtctcaagctgtgcaggtaattagtctcatcacgtttggcatttttataacgatatttatcgttaaggacttcaagggaaaacaaacaacatggtcaaatctcaaccgattttgagatatattttgcgcgggattcctgcgattgcagttgcggttctgctttctgcttgtagcacaaccaccaataccgcaaagaatatgcattctgagacgcatgctgtgggcaatagcgatagctcttcactgcaagcctctcaggatgaatttgaaaatatggtgcgtaacctcgacgttaagtcgcggattatggatcagtatgctgactggaaaggcgtgcgttaccgcctgggcggcagcactaagaaaggcgtcgactgttccagctttgtacagcgcaccttccgtgaacagtttggtttagagcttccgcgttcaacctatgaacagcaggaaatgggcaaagcggtttcacgcaataacctgcgtacgggcgatctggttctgttccgcgccggctccactggtcgccatgtcggtatttatatcggcaataaccagtttgtccatgcgtctaccagtagcggcgtcattatctccagtatgaacgaaccgtactggaaaaaacgctacaatgaagcgcgtcgagttctgagccgcagttaatcttcatcaggcagcacctcccttggcttacctgatgagacgacataaaaagcactgcttcagcagtgcttttgcttattatcccttctgaacccgttttgccgaatggcgacgtgtggcgtcttatccagcctacaacacacgaacgtaggcctgataaacatagcgccatcaggcattcaggtcgtttcccccaacggctactgcgacaatacgctttcctgcgcatcacagaaaagcatgactatccggggtaatccaggctatagtcttataaatcaaccagtttaaccggcatccgccttttcaggtcacaccaggaattatgctaacacgcgactcctcttccggtcggaaaatcctgcttacctgtatcattacggggatagcggcagcattacttattggtagcctgcaatttttcctgtcgtggcataaacgggatgttaaatacaatacgctcctttctgatgtacaacattacctggccagctatttcgccgacctgaaagccaccaccgatattcttcaaccgttgacgatcaacacctgtcagcaggttggcgcagaactcacctcaagagccgcttttagccttaatgtccgcgccttcttattgattaaagataaaaaagtgttctgctcttccgccactggcgccatgaatatgccgcttcagcaactggtaccggatatagatatccgcaaagacgttgctatggcgattctgcccggcacgccaatgatgcccaacaaaccgacaatggtgatttggtatcgaaacccattattaaatgacagcggcgtattcacatcgctgaatattaacctgacgccctacttactctataccacgcgccaggatgattttaacggcatcgcgctgattgtcggcaataccgctctgtcgaccttttcttcgcgtctactgaccgtcgcggagctgccgggcacgccatcacgactggcaactatcaacggcctgccgcttaaaatacggctttatgccgatagctggacctacaatgacttgtggtatgcgttgatgctgggctgcattagcggcatcgtagcagggtttatctgttactttatctatgccctccggacgcgaccgggcaaagagattttaacggcgatcaaacacgagcagttttatgtggtttatcagcccgtcgtcgatactcgtacgctgagcgtcaccgggcttgaagtcttactgcgctggcgtcaccctacggcaggcgagattccgccggatgcctttatccactatgccgaagcgcagcaacttatcgtaccgttaacgcagcatctgttcgagctgatcgcccgcgacgcacccacgctacagaaggtgatgcccgtcggtgccaaatttggcattaacatcgcgccggaacatctgcacagcgacagttttaaagaggatatgcaccggctcagggacgccctgcccgcgcaccattttcatatcgtgctggaaatcactgaacgcgatatgctccagcagtatgaagcggccaaactgttcgaatggctgcattccgccgggtttgaaatcgctatagatgatttcggtacaggccatagcgccctgatttatctggagcgatttactttagattatctgaaaatcgatcgcggctttatccaggcgatcggcacggaaaccgtcacgtctccggttctggataccgtgctgacgctctccagacgcctgaatatgctgacggtggccgagggcgttgaaacgccggagcaggcccgttggctacgcgatcacggtgttaattacttgcaggggtactggattagtcgtcctttacccctaaaagatttcgtgctgtggatgtcggcgccttctgtgcctgaatggtagcccccttacggttttaacggattcacatcagacgcaacgtcacttattattcagcgaaacgcctgccggtttgcagcgggcaatacgataaggaaaccgccttcagatgattgcgcgcgtaatgcttctgcttgtcgcactggttagcgctggcgcccaggcccaggaaatcaaagaaagctacgctttcgccgtactcggcgaacctaagtatgcttttaactttgagcactttgattatgtgaatcctgctgcgccgaaaggcggtcagatgacgctttccgccattggtacgttcgataatttcaatcgctattcgctgcgcggcaatcccggcgtacgtaccgaagccctttacgatacgctttttaccacctcggatgatgaacccggaagctattacccgctgattgccgaccatgcccgctatgccgccgactattcctgggtggaaatctcgattaatccccgcgctcgttttcacgatggcacgcccattaccgcccgcgatgtggcctttacctttcataagtttatgaccgaaggcgtaccgcagttccgtctggtctataaaggtactaccgtgaaggcgattgcgcctttaaccgtgcgaattgagctggcgaagcctggtaaagaagacatgcttagtctgttttcattaccgatcatgcccgaaaaattctggaaaaatcacaagctcagcgatccgctttcaacgccgcccttagccagcgggccataccggattactcagtggaaaatgggccagtacattgtctattcacgcgtcaaaaactactgggcggctaatctgccggtcaatcgtggacgttttaacctcgacactatccgctacgattactaccttgatgacaatgtcgctttcgaggcgtttaaagcgggcgcatttgatctacggctggaaaacgacgctaaaaactgggcaacgcgctatatcggtaaaaatttcgataatcattacatcattaaagaagaacagaaaaacgagtcggcgcaggacacacgctggctggcctttaatattcagcgcccggtatttaaagaccggcgggtacgtgaagctgtcaccctggccttcgattttgagtggatgaataaagcgctgttctataatgcctggagccgaaccaacagttacttccagaataccgagtacgccgccagaaattaccctgacgccgatgaactggtattactcgcgccgatgaaaaaagatcttcctcctgaagtcttcactcagatctatcagccgccggtctctaacggcgacggctacgatcgcgaaaatcttcttaaagctgacgccttgttgacgcaggccggatgggtgatcaacggacagcaacgggtcaatagcgtcaccggtaagcccctgacgtttgaacttctccttcctgccagcagtaatagccagtgggttctgcccttccagcataatcttcagcgtctgggcattacgatgactatccgtcaggttgataattctcaactcaccaaccggatgcgtagccgcgactatgacatgatgccgaggctatggcgggcgatgccctggcccagctccgatctacaaatctcatgggcgtcggaatacattgactccagttataacgctcccggcgtacaaagcccggtggtggataaactgatcgcgcaaattatcgcagcgcagggtgataaagcgaaactggtgccgctgggacgggcgctggatcgcgtgctgacctggaactattacatgctgccgatgtggtatatggcgcaagacaggctcgcctggtgggataaattctcccatccggcgattcgcccggtatataccatcgggttagatacctggtggtatgatgtcaacaaagccgccaaactaccggcagccaggaggtagtaagaatcaatgggcgcctatcttatccgccgtctgttactggtgatccccacgctatgggccattattaccattaacttttttatcgtgcagatcgctcccggcggccctgtcgatcaggcgattgccgcgattgaatttggccagggcggcgcgttgcccggcgccagcggcgaaggcgttcgcgccagtcatgcgcaaaccggcgtcggcaatatcagcgacagccattatcgcggcggccggggactcgatccggaggtgatcgcggagatcacccatcgctacggcttcgacaaaccgctgcatgagcgttatttcaagatgctacgggactatctctcttttgacttcggcgacagtctgtttcgcagcgcatccgtactaacgctgatcaaagatagccttcccgtctccattaccctgggattatggagcacgctgattatttatctggtgtctatcccgctggggattcgcaaagccgtccataacggcagtcgctttgatgtgtggagcagcgcgtttatcattattggttatgcgatccccgcctttctgttcgctattttattaatcgtcttttttgccggcggcagctactacgatatctttccgctacgtggcctggtctcagccaactttgacacattaccgtggtaccagaaaatcaccgattatttgtggcatattacgctgccggtgttggcgaccgtcatcggcggttttgccgccctgacgatgctgacgaaaaattcgtttctcgacgaggtgcgtaaacagtatgtcgttaccgctcgcgctaaaggcgtgagtgaaaaaaacattctctggaaacatgtttttcgtaacgccatgctgctggtgatcgccgggtttcccgccacttttatcagtatgtttttcaccggctcgctgctaattgaagtcatgttctcgctcaacggcctggggctgctgggttatgaagcaaccgtttcgcgcgactatccggtgatgttcggtacgctttatatctttaccctgattggcttattactgaatatcctgagcgatatcagctatacgctggtcgatccacgcattgattttgagggacgataatgccgcgattaagcccggtcaatcaggcccgctgggcgcgtttccgccataatcgccggggctactggtcactatggattttcctggtcgtgttcagcctgagcttatgcgcggaactgattgctaacgataagccattgctggtgcgctatgaaggccagtggtattttccgctggtaaaaaattacagcgagcgcgatttcggcggcccgctggcgacaacggcggattatcaggacccctggctacaacggcagcttgagaatcggggctgggtgttgtgggcccccgtacgctttagtgccaataccattaattttgccaccacgcagcctttcccctccccgccttcggcgaaaaactggctgggcaccgatgcgaatggcggcgacgttttcgcccgcatcctgtacggcacccgcatttctattttattcggcctgatgttaacgatttgctccagcgtcatgggcgtactggcgggcgcgctacagggctattatggcggcaaagtcgatttatggggacaacgtctcatcgaagtctggtcggggatgccgaccctgtttctgattattttactttccagcgtagtgcagcctaacttctggtggctgctggccataaccgtgctgtttggctggatgagtctggtgggcgtggtgcgcgccgagtttttacggacccgcaattttgactatatccgcgccgcgcaggcgcttggcgtcagcgatcgtgacattatcctgcgccatatgttgcctaatgcgatggtcgctaccctgacatttttaccgttcattttatgtagctccatcaccaccctgacgtcgctggattttctgggattcggtctgccgcttggctccccttctctcggcgaacttcttttacaggggaaaaacaacttacaggctccctggctggggatcgccgcctttctgtctgtcgccattctgctatcgctgctgatttttatcggcgaagcggtacgcgacgcctttgatcctgctaaggcggtataagatgacatctccattgcttgcgattgaaaatttatcggtaggtttccgtcagcaacagcacgtgcgccctgtcgttaacgccatttcgttacaggtgaacgccggggaaacgctggcgctggtcggcgagtcagggtcagggaaaagcgtgacggcgctttccattctgcgtcttttgcctacccctcccgccgtctacctctccggcgatattcgctttcacggcgaatcattgcttcatgccagcgagcagacgttacgcggcgtgcgcggcaataaaatcgccatgatttttcaggaaccgatggtttcacttaacccactgcatacgctggaaaaacagctctatgaagtactgtcgctccatcggggaatgagtcgggaggcggcaagggcggagatgatcggttgtctggatcgggtcggtatccgccaggcgagccagcgtctgcgcgattatccgcatcagctttccggcggcgaacgccagcgcgtcatgatagccatggcgctgttaacacggccggaattactgatcgccgatgagccgaccaccgccctcgacgtctccgtacaggcgcagatcttatctctactgcgggaactccagcgcgagctcaatatgggattgctgtttatcacccataacctcagcattgtaaaaaaactggcggattcagtggcggtaatgcaacacggcaagtgcgtagagaaccaacgcgccgacacgctgctctccgcgccgacccatccgtacacgcaaaaactactcaacagcgaacccactggcgatccggttccgctccccgccgggcaggcgccgttgctggaagtggacaagctgcgcgtcgccttcccaatccgcaaaggcattctgaagcgcgtcgtggatcataatgtggtggttaacaatatcagtttcaccctgcatccaggcgaaacgctgggtctggtcggcgagtcaggatcgggaaaaagcaccaccggtctggcgctgttacggcttatccgctccgaaggccgcatcgtgtttgacggtcaatcgctggatacgttaaaccgccgccagcttttacctgttcgccaccgtatccaggtcgtattccaggacccgaactcatcgctaaacccgcgtttaaacgtattgcaaattatcgaagaaggcctgcgcgtccaccagcctacgctttcaggcgcgcagcgcgaacagcaggtgaaagcggtcatgatggaagtcggcctggacccggaaacgcggcatcgttaccccgctgagttttccggcggccagcgtcaacgtatcgccgtcgccagggcactgattttaaaaccgtcgcttattattctggatgaaccgacctcatcgctggataaaaccgttcaggcgcagattcttgccctcctgaaatcgctccagcaaaagcaccgtctggcctatatcttcattagccacgatctgcatgtagtacgcgcgctgtgccatcaggttattgtgctgcggcagggggaggtggttgaacaggggcaatgcgagcgcgtgtttaccgcaccgcaacaggcctatacgcgtcagctactcgcgttaagctgacgcctaaaaaggattattgttagaaaaaggttccgctatcgccacgccgaaatttttcagccgacaggtggcggcaaactcatcctgacgattaacgaacaggcacggctccccttcgcactccagcacggagcaaggaacttcaatatcgcttagcgcctggctgagcttatgcatcactgaccacgcgctatcgcctgccggactcaacagtttaagcgccaccagactattctcggtgctctgcccgttttgcggaatcggttcaacctttgaccccgcaaaacccgccgaccagcgatagttttgcggcagacggtgaacaattgagagctgtaatgtattcactttctttccccggaagcacaattacttcacaatttacttacatttatattaacacatcattgacaacccgtccttaaacagattgctaacgcccttctctccgtcagtggctctacagcaagcgggagttaaaatagttttaccgacacggagatagcggcgggctatatgtacccgtttctgcgatctaactcaacctttttaactacaatgatgtgactttttacataaatggattttacataaaataaacataaaggaggaaaatgatgaattggtaattgatatacatcaactatgaaagccgtttggctttgccatcgtgtagcggatagcatcccccaacgccgcctgcgcattcttcggcgccattgagggacagcgcgcccgtcaccgttttttgggacggctggcgtagagataaaacagaatggaacaggcggcgcaaagcgcaatcgaccagatcatcggccacgcactgttaaaggtagccagcgacagcaacgcgccgacgatagcgccaataccaaagcggaaagtgcccgccaacgaagacgccgttccggccatatgcggaaactcatccaaaatgaccgccatcgcattggacgaaaccatcgacacacagccgacaaacgccgcaacgccaaccaccagcgcccagaatccaatgcccatcagcgcgctgaaaaccatccacaccgccatcgcaaactgaatccatagcccggcccgaaacatgtttagcgcccctacccgtctgacaaaacggctgttgataatcgtcatcacaaacagaaatacgatgttcaacgcgaagtagtagccgaaatcctgcggcggaacatgattaatttcgatataaacaaacggccccgcgctcaaaaaaagagaacataccggcaaaactaaacccgctcgccagcatatagctcagtacgcgtttgtggcgaaacaacgcggcaaagttacctattgtggtacgaatatgaaaaggctgacgccgctcaacgggcagcgtctctttaatcagagcaaagatcatgactgacgccagaatcgccgcaatggccagtatccagaagatatagtgccagcttaaccataccaacacccagccgccgacaatgggcgccattaacggcgctatcgtagtgaccagcatgacaaatgacatcatgcgcgaaaactcttcctttggataaatatcccgcatcagcgcattgatgacgacgcttgccgccgcggccgccaaaccgtgaaagaaacgcatcacgatcagttgatcgatagtctgcgccaacgcacaggcgaccgccgcagcggcaaataccagcgtcccgcccaggatgaccggcttacgcccgaggctatccgccatcggtccatagataagctgacccagcgcaaaccccaaaatataggtgctgagcgtcatctgcgcgctaccggcaggcacgccgaattgcgcagaaatcaccggcagcgctggaagatacatatcaattgacagcggcattaacatggccaacaggccaagaataaagacaatggcaaaggaagagtgctgccgggtggtcacatcgaactcctgaatttaacgagatagttagccgacgctggcgatttcttcttcagtcaacgggcggtactcgccgggagccagattctcatccagcgtaatggcgccaatccgttcgcggtgcagttccacaacgcgattgcctactgcggcaaacatccgcttcacctgatgataacggccttcgctgatggtcagacggacctgcacaggtgttatcacctccagcgtagcgggtttagtgagatctttttcattatgcaactgcacgcctttcgcaaattgcgctgccgtatcgtcggccaccggcgactccagggtcaccagataggttttttcacagtgatggcgcggcgacgtaatgcggtgcgaccactgaccgtcatctgtcattaacaccagaccggtagtatcgatatccagacgtcctgcggcatgcagcttatacgccaccggctcatccaggaaatacagcaccgttggatgatcgggatcatcggttgaacaaacgtatccctgcggcttgttaagcataaaatagcgtggcccgtgttgctgcgctaagggattgccgtcatacgcaaccgcatgttctgggagcagtttgaaggccgcatttttaatgatgtcgccatcgacggtaacgcggttaccacgaatttcacgcccggcaatagcgcggctgacgccaagctgctgagcgataaatttatcaagtcgcatgtgtgtgatttagcctgtaataatacggaaatcgggcattctacccgaaaaaagggaattgctatccgctcagtatagcgggctaactatatccctcaagggaaatgattcatggcatactattcccggaaccgtttaacgtagtgagaccatgatttttacactccgcccctaccagcaagaagccgtagacgccacgctcagccactttcgccgccaccgtacgcccgccgtgattgttctgccgaccggcgcaggtaaaagcctggtgatcgccgaactggcgcgcgtcgcccgcggacgggtactggtgctggcgcatgtgaaagagctggtcgcgcagaaccacgccaaatattgcgcgctggggctggaagcggatattttcgccgccggactcaaacgtaaagagagtcagggcaaagtcgtgttcggcagcgtacagtcggtggcgcgtaatcttgacgccttccaggaggagttttcgctgttgattgtcgatgaatgccaccgcatcggtgacgatgaagacagtcagtatcagcaaatcctcactcacctgagtaaagttaatcctcacttacgtctgcttggactcaccgccacgccttttcgcctcggaaaaggctggatttatcaatttcattatcacggtatggtgcgcggcaacgacaacgctctgtttcgcgactgtatttatgaactgccgctgcgctatatgattaaacacggctatctgacgccgcctgagcggcttgatatgccagtggtccaatacgatttcagccgcctgcaggcccaaagcaatgggctgttcagcgaagccgacctgaaccgcgagctgaaaaagcagcagcggattacgccgcacatcatcagccagattatggaatttgcgcaaacgcgcaaaggcgtgatgattttcgccgccacggtcgaacatgcgaaagagattgtcggtctgcttccggcggacgacgcggcgctgattaccggcgatacgccagggcccgagcgcgacgcgctgattgataatttcaaggcgcagcgttttcgctatctggttaacgtctcggtactgaccaccggctttgacgccccacacgttgatctcatcgcgattctacgtcccacggagtcagttagtctttaccaacaaattgtcgggcgtggtctgcgccttgcgccgggaaagaccgattgcctgattcttgattacgcaggcaacccgcacgacctgtatgccccggaggtcggtagcccgaagggaaaaagcgataacgtccctgtccaggtattttgcccggcctgcggctttgccaacaccttctgggggaaaaccactgccgacggcacgctgattgaacactttggccgtcgctgccagggctggtttgaggatgacgacggccatcgcgagcagtgcgattttcgctttcgcttcaaaaactgcccgcagtgtaatgccgaaaacgatattgccgcccgacgctgccgggaatgtgacgccattctggtcgacccggacgatatgttaaaagcggcgctcaggctcaaggatgcgttagtcctgcgctgtagcggaatgacgatgcagcatgggcaggatgagaaaggcgaatggctgaaaatcacttactatgacgaggacggcgcggatgtcagtgagcgcttccgcttgcacacgcccgcccagcgtaccgctttcgaacagctatttattcgcccgcatacgcgcacgcccggcgttcctttacgctggatcacggcggcggatattgtcgcgcagcaggcgctgttgcggcatcccgattttgtggtcgcgcggatgaaaggccagtactggcaggtgcgtgaaaaagtgttcgactatgaaggccgcttccgccgggcgcacgaattacgtggttaattgtacttttcattgatgtaacggcgatttgagtatagaatcccgcccgcctttgcatacgcaaagcagatcacttacctgttgctgggtcgcctgtagcaggaattattaaagagagatttaaatgtttactatcaacgcagaagtacgtaaagagcagggtaagggtgcgagccgccgcctgcgcgccgctaacaagttcccggcaatcatctacggcggttctgaagccccgattgctatcgaactggaccacgaccaggtgatgaacatgcaagctaaagctgaattctacagcgaagttctgaccctcgttgttgacggtaaagaagtaaaagttaaagctcaggctgtacagcgtcacgcttacaaaccgaagctgactcacatcgacttcgttcgcgcgtaatcgcctggaagttgaagaaaaaccccgccccggcggggtttttttatgcgtttaattgaatttgacgacatgcagagcaacgagaacccactttgcttttctgctttcttacacctcgccacattcaattagcgcctcccctaatcgaggatctgtagtttccgccgcggtattcatacctttaagccgattgaataatgcccgttgacgaacgctggcactttccggtttccatggcaaaattcgtattggtatcgtttgcccatcattcaacgcatcaaataccttttcattggtcagtaagtcgccgcagctccatgtcttgctatcaaactgaaaatcaaataagacatggagttccagttcatctacacgcacttgacgctttgcattatcgatgcgtatttccaccttctctttatgcgtcaaagttgcatcaagattgagtccataccgtttcaactgccccttgtcgtaatagtaacgtatgctggaccaggttgatttaaaagcaaatccagtaatgaataaaccacttaacaagaacagcgggcatatgaacaagctcagtaaccagttggtgccataagtataaaacagtaccaacgagagaacggtgaacaccatgccgagcatcaacatcatcaaaaatgcgacaatgtgcgcatacaaaacctgccgaaataaactgaaattaacaggcggcctctgacgtattcctttactcactacggcgtccttttatgtcgtatgcctttatttcccgcccgacgtgcgtcgctgcaactgatcgcgcaaattcggcggcgtccctttgatagtcagggtatcggtcgccgggtcccagaaaatccgctcgcccagtagcatcgcatcaaagttaatcgttaacccgccgccgctgccggcatatttggttaactggcgtagcgtactgcgatctgccgggaagctctcttccagctcatagcctttttcggcggtaaattcgctgaagctgacttcactgacgccggaaagctctttagacagcgattccagctcaatttcttccccggcttgtaattgctcattgcagtagctgtacacctgctggcgcacgttctgacgttccgctttatccaactgcgcttctgcggtgaaatcatccactgcctgcaacaggccgcgattctgcgctttggcgttcaacccttcgctggcgccgaggaaatccataaagaagtcagcgaccttgcgccctacccgacctttgagaaacgtcagatagcgggtcgattgcggattagtttcccactcggtaagatcgatacgcgccacgatatccgcatggttgatatcaagataatgcgtcgggttaatgtccagattttcattgacccgcatactactcaggttgttcagtaccgtaaccagcagatactccaccgccaggtaacgataatggcagaacaatacaatgccgccgtccgcaaagggatatttcgccagttcgtcacgcaggcgtccggtcgccgcccggctaaaggcaagaaaatcttcttccccctgacgttgcaaccgcagcgcttgcgccagttcactctcttcattaaacaggccatacgccttattcttggcgctatagacccgatgcagttcagccaccatctcgacaacggtggttgtcggctccagcaatgaatcgcgcaagaccagctcaagattttgctcatcgcgcttgataagctggtgcagggcaatctggttgatatccagactcatgataaactctcctttaagaccgggcggtattcaaccaccgcctgccggaagacgcaagcaatcgccctgtcatttcaggcgttatccgtaacgcgaatgatttaggggataaaaatgcagaaaaaaaactgttgctacggtaatatgttgccctttcatgaacaaacagattttgatttatgccacaactctcccgctatagtgatgaacatgttgaacaactgctgagcgaactgctcagtgtactggaaaaacataaggcgccgaccgatctttccctgatggtgctgggaaatatggtcaccaaccttatcaacaccagcgttgcgccggctcaacgccaggcgattgcgaactcttttgcccgcgccttgcagtcttcgattagcgaagacaacgcgcactaaaaagccgactccggagaaacaagcgacaggtatggtaactcatcgtcagcgctaccgtgaaaaagtctcccagatggttagctgggggcactggttcgctctgttcaatatactgttggctacgttgctcggcagccgttacctgtttgtcgccgactggccgacaacgcttgcgggtcgcatatactcctacctgagcattgtcgggcactttagctttctggtgttcgccacctatttgcttattctttttccgctcacgtttatcgtgatgtcccagcggctgatgcggtttttatcagccattctggcgaccgcgggtatgacgttgttgcttatcgacagcgaagtctttacccgtttccacctgcatcttaatcccattgtctgggagctggtcatcaaccctgaccagaacgaaatggcgcgcgactggcagcttatgtttattagcgtgccggttatcttattgattgagatgctatttgcgacatggagttggcaaaagctgcgcagtctcacgcgccgccgccatttcgcaaggccgcttgcggcattctttttcgtctcctttatcgcatcgcatcttatctacatctgggcagacgctaatttttaccggccgattaccatgcagcgggcaaacctgccgctctcttatccgatgacggcgcgacgttttcttgaaaaacacggtctgctggatgcgcaggaatatcagcgccgtctggtagagcaaggcaatccggaagcggtctccgttcagtacccgctcagcaatttgcactatcgcgatatgggcaccggtcagaatgtgctgctcattaccgtagacggcctgaactattctcgctttgagaagcagatgccggagctggctacatttgccgagcaaaacatcgacttcacccgtcatatgagttcagggaataccactgataacggtattttcggcctgttctatggcatatcgccaggctatatggatggcgtgttatccaccagaacgcctgcggcgctcattaccgcgttgaatcagcaaggctaccaactgggactgttttcttcggatggcttcgccagcccgctttatcgtcaggcattactgtccgatttctcgatgccggcagcgcaaacgcagtctgatgcgcaaacggccagccagtggatagactggcttgggcgctacgcacaggaagataaccgctggttctcatggatatcgtttaacggtactaatattgatgacagtaaccagaaaaattttgttaagcgttacgccagtgccgccagcgacgtggatgcgcaaatcaatcgggttctgaacgcgctgcgagaggccggtaaattcgacaatactgtcgtgatcattaccgcaggacgcggcataccgttgacgccggaagaaaatcgcttcgactggtcgcaaggtcatctgcaagtaccgctggtgatccactggccggggacgcctgcgcagcgtattaatgtgcttaccgatcataccgatgtgatgaccacgttgatgcaacgcctgttacatgtcagcacgccagcgaacgaatattcacagggtcaggacatctttaccgttccacgtcgtcataactgggtaacggcggcagacggcagtacgctggcaatcacgacgccgcaaatgaccctggtgctcaataataacggtcattatcagacctatgacttacacggcgagaagatcaaagatcagaagccgcagctcagtctgctgctgcaagtgctaacagaagagaaacgttttatcgctaactgattaattataaatcagttagcaccgtttccccttgcattcgcgttggaaagaggtagtattagcacccacaagtcggcacgtagcgcagcctggtagcgcaccgtcatggggtgtcgggggtcggaggttcaaatcctctcgtgccgaccaaaattcctcgaagaaccagcctgttacggctggtttttttatgcctgttttctgaacggggaagcaacggggaataatcggggaaaaaccccgacacaaaacatcgactttaccgtaaagtttcaactattcacatcaccgggcagtcatcaaactccgcgttcctggcatcattaatgatgtacgtgataactccaaatattgcgtgtgaagaattgtagccatcaccatcttctggcagcgcttcctttctcccgttctccagatttatcaggtggggctgagggtgagttcggtatcgcttgatcctgaattccccatctatcgcgcatatcagcagcgagccatcacaggctgaaagcgacgcgtccacaacaagtagcgccccctggattatcccttccctgaaatgtgaacgcgatgcccgcatgaaataagtcgctgcgggctggctgattagctgctgatcgagggagatccttgtttcaacgtaatcactggcaggtgaagggaagcccatggctatagtcctccgtttggattgaacagctgaaaggtaggtctccccttcctgcgttgatacatcgcggaatgttgtcacataccactcgatccattcgttagcctgcttcatcgtccagttccagttaaccttgctcagttgctggacaaaccgctgtgtggtgacggtcttccggccattaggttcctgctgtatcgaagcataccaggctatttcaatattgatggtttgcccggagcaaaagatatcattctgggagaattgactaagagggttcaccggatcttccccgatgctgatgttcgggttaaaccgatgatgacactaccggcgatcaatactgacgccagcaagcatgagaaggaacagataagccgtactgttcaggaaatgtttgaagaggctgaattctggttagtgagcgagtaaagtttttcaatatccgccatagttacgttttgatcgcgctgtggcggattttcattttcgtaaacgttcccttttcccattctcaaaatttacagggtgcgattgcgaatgtgtccggtaccgcttaatcctgaactcctctccatctatgcaaaccagcaatgagtcgtcgcgtggcgaaacggacgtatcaataaccagcaagatgcgctggtcagtgaccttctttgatgtagttgatgtagttgatgtaacaggtcaattttaggtgacgacttttataaaaaagtctatcatccattatcttaatttcgtcttgtgtggcaccttggaattataggtaaaaaatgatctacaagaaattcagactcgatataaatgggctaagagcttttgcattgataagtgttgtgctgtatcacttcggtgtaccttatgtgtcaggtggctttataggtgtagatgttttctttgtaatttctggttttcttatgactggaattgtccttgaacgcgtagaccacaaaggagtacttgatttttatattgcaagattcctaagaattgtaccagctctggtatttgcaattctcttgttgatgattttcggtttatttacactaagtacaaatgaatacgaagcacttagcaagaacgcaatatcgtctttacttttttattcaaataattattacgcaattcactctagttatttcgactcatcatcagagttcaactttttgcttcacacctggtcactatcagttgagtggcaattttatattttatatcctttattagtcattatagttaaaaaattacggtttcctgttggactctcattatctgtaattttagccatgtcacttgcaattacacttatgcgagtgactggaaccaaagaagatattttctatcttatccctaccagggcatgggaaatgctggctggcggccttgtatacatagcatctgtacgttacaaaatgccagaatggataaagcattgtgaggtttatgggatagtcctcattgttgttgctgttgttatactgcacagtaatggttactggccaagctattcagcactcgctcccgtgctgggtgcttcgatggttattctggctaacaaacagaactctttattcacatcaaacagaattgcacagtgggtgggtaagatttcttactcagtttatttatggcactggcctgtaattgtagcgatgaaacattatgatattgagttcagcgctataaatattttctttggtgtaattgtgtcttttgcgcttggggatatttcatacagaacaattgaaaacacgctcaggaaacgagttaagctacaatttaatattgtattattttcctctactctggctctatgcttgtttgtcatgttcacaaaaggtgttagttttagattttcagacaccctaaagcaagtcgttgagtatcgtatggacaactctccctggaggcctgatatttgcttcctcaatccagatcaagattattcagcattctcaaaatgtcaggataaaatgactgaaaagtcttttgttgtatggggtgactcgcatgccgcacatcttatgccagggctgaaatcggtatttggaaattcacttaacattacgcagagaactgcaagcttgtgcccaccaatcattgggcttcaaaaagatgacaggccgtattgcaaagacatcaatgatatggtagccaaggaaatttcagacaacaagcctactacggtattaatgtccgcgttgtggcctgtctatcctatgcgtgattatctgcctgagactattaaattcctgaaggataacaaagtaaaaaacatcatcattgttggcccgttcccggtttggaagaaaacgatgattgatactattgaggatatggggattaattccggaaggaccgttccatggagcatgacggatgaaacccgtaatctgagagataatgacaaatatcttagagagctggcgaaagagcattcccttacttatatttcaccacttgagactatgtgtacagaaagttattgcaaagcaataatagggaatagaattgcttaccctatacaatatgacaatgcgcacctaacaccagaaggctcagggtggtttattgaggaagtgaaaaagcagatttcaaaataaacagaggggcttgcccctctttttattttataaaactacaacaataatgcaaattattttatgtgtatagcttttctgatggggcatgctatattttgtgcaaccgatgtatcaaccgctttcagcgcatcgagataatccagccacagattgtactgcgccagttcgtcgcccgtcaggcgcccgagcgccgctttgcccggccaccgcctgctgttcatgtgctcgttggcctgatcgattctcttcttcttttcctgatttgcggcagaaattaaatcatcttgcgttggaggtggaatacaaacccaggcaatacgtccatttgatgaaccgagatacattccctttggtggagttttcatataatacttatcaacttcttcatcggtcagagcataaaaatcattcgaccacaacccactggccttataagctggaatgttctcctctgaaaaatatgtgtttgatgtcgaggaaaaacatattatgctcatgtcaataccccatgtaaattacagatatggaattatcgccaccggatggattaaatatacgaatagcaccgttgttctcaatcaaatatgttggggatatcgtaatatcaccttgtgcatcctgaggggtaagcgtggcagccttgaatacataaggaaatgttgttggtaatggaaaaacataccctgaagggctattcccgggaacaaagcaatttaaagcctgaaagattgcgccaccgggcagagaggtatagatcccggcagggttgtccctgagaacaaatgaagaaatgtccgggttctgattcgcgccgttgcccacgtcccgttgtgcggccgatttcaattgaacgtttcgagcacatgatttttatctatttattcagatattccggccagttaatatcaggtgcaacatctagcgccagtcggcgcagctttgttcggtattcacgtagcgcagtgagttcggacaattcagcagccgttatatcgccatcgtcctgagcttctacaagctgattgatttttgctgtgaccgacgtcatacgcctgtcgcgctctgccgtagctaaagcaacataatcaatctgaacaggggcaataacgccgttgctgtaggtaaaattcccaggctgaaaaccatcgggaatatcagtatcagcgaattccacaacagagcaattcagcggaaatagcttagtcgcatctttatccgcagcaataatcagccctgttttgtcatactggattttcagcgtatcgggctggaataacttctgtaacacataccagtcaacacctgattcatcctggataaactgaatactgcaattctctgataatttctgctgaacaagggttaattccgttgttttagtgaaatttttaaaatgcctcatttttatgctcccaccgtataccactggccattcactttaagctgtaacaggcgtcgttggatcctgtctggtgtatcgttcgagtctccattctcaacacctgtaatgacgtaacctaactggtctgcaaatccgggcgaacgatataagtttccatgctcaacggcaccgaatcgaattgactgaacatacccactcagcatgtcagttgtagcaaggaatacaccagacccatcatcatgaagcataaatggctttgttttgtcgttctggtacacaccaaccatggtgatgtactgacgcgctggcttagaagccacaaacgcgctcagccagcccggtccgctaccaccgccccatatatcaccgtatacatcgccatttttgttgaatatcgcacttccagcctgcaagttttcagcagctgcgataacaccgagtcgggtgctgatatatgcccggatagccaggtcttctgagttctgaaatccgataccattccatgacttaatgttcagattgttaccattaaaacctgcaccatcaacgtcacctttagccatcccaccagtgccatccccaaccgtaaccagggtatcgccacgcatatttggtgcagaaataccccccgtaaaggcgcccccctccagcatcgccacttgacgccatgaggtaatacccgttcctgttccgtgaccaaacaatacgttattgccactgactgcaagaacatccacaacagtggtcggacttaccacctcgctaagggtaataatttgccagaaacttacctggtctggcgcgtcgggggcctgatgcgcacgcataaactgacagcctgtagccgcacgcgcgccgattgatgttcggtcaattgcgtcactgacaaacgttcccgcgaggaatcgcccgtcacctttaaaaagaacgtctactaaaccaacgttctggagaaacagcggcttattcgggatgtccgcgccattctgatttttttcaagacgggttttaacctgttcatagatcaacctgccaatggcggcgtgaagctgcgtatgttcgcctttactgagtggtatgccggcggcttcaataacagtacagacctcttcctggactgcatcccacatatcactgttgagatccgttgcgcggcggcccgtggcgggatcaccattcgtaaatccgtttttcccctgaccaaatttatctttttgcgcagtgggcgtatcaattctgtgcattctcttttccttccggataagcaaaaacaacaaccgtatgtgacggacaaagcttatcaatcacacattcagcaacagtatcgccccacgttctgatcgcagaatcgcaggtgcttgtacaggtctgccatccagcagacgggaaaaacgggtaatctcacgaatcaccacaccatcctcgtcctggtaccattcctctccgtcgcgggcgacgcgaaatgcaaaagaggactggttgatatccccgcgctgcattggtgccaacaccagatcacggattgtctgagtttctggcgcggtgatgtcataacgcagcccccgctcatcaaccgtcagtgccagcgtgcccgcacttctgcgacccaggataaaattggggtcatggttgaacaacgcccgtacatcgtcattcagcacttcatcaaacgcaccgggccggatgatttcgcgaaacgaaccgaaaatcagttcagaacgactgtcaaagaccgaaccatacccgatgatccggctgggctcgctgtcgtgcgtttctgcgcgcacctcgccgctgtaacagcgaatttcacgttcactcatcttgagtgttctcctagattgtggttttggctggccgggaggcgttgacgctgaccagcatttcatcaaggccgtctttcggattcatgtcctcaaacgcgcgtgcttcgttgcggctcatccatccgacatactcaagagcagatgcaaaggtcagtgtcagagcgccacagagcaaaatctcgagcatttttcgcttccagccgccaccactgccaaaataggcgatgcgcaaaccagccataacaatcgacataatgactgcgcccagcggtgtgtctccacgccaccagctctgtaacaattcaagtaaatcaggccaggtatttgggttatgaggcatttgtagttatctctcacctcgctgatacagcaggtgcaaattgagggaataccacgtaccgcaaatcagaagcggaaacgtaaaagaagccgagccaatcgataactgcgggataggccaggcccaacgaatcccaggcccagaaacgacaaaacccgctcgacggcgggtttaagctgcgtggcaaagtaaccactcttagcagattacaagaatttttgcggaccgcgttaatgatttttaatcccaaagtcgtattatgcgttttttactgtaggagttaacaggcttatattatgttagaaacactatcattcactgaacgtgacgagttccaacgaagaaacatcgctgaaaatatcatcaaattgctaaaaccagaggcagacatttcaccactggtaatagacggtgcatgggggacagggaaatcagaatttagtatcaaactgaagaatctcattatcgagcaagaaactgagtctaaagttgtctatgttgatgcctttaaaggggatcatgcagaatctccattacttctaataacatcagctattgcgagcattttgccggaggaggaaaaacaaaacttcattaagagatctcttcctgcaattcgatttggtttaaaaactgtactaaaagctggtgcaggttggtttttacgacaggaggctagtgaagttgccgaagaattccaagatgcgatgaagaaagcaagcaatgcagcaatagatgggactattgaaaatatacttgaagaccacatggaatcagagaaaaacataaactctctaaaatcttgcattgaagatatatcaaacaagcaaaagatagtgataattattgatgaattagaccgatgtaagccaagtttttcaacaaatatcattgaaacaataaaacacatctttgatatcaataacgtattttttattttagttacaaacactgaacaactaaaagcatctataaatcatatttatggttatagcattaactcacaaaagtatcttgacaagtttataaaatataccattactcttccagacacatgcttaataaatgggcataacgtatgtaaaacctcggttatatattgggatcaccttgtaggtgaaactacattactaaataaaatcaacagcttagttggtagctttatttgtgatttaattcaacgaaccaacttatccttacgtgaaacacaaaccttttcacgcaatcttaacattttccgactgttaaacgacaatgagtgcaaaagcaatgatccttttataaatatgatcgttgtcgtagctgtcttcatacattgttttggtgacaaggaaaaactaaaacaagaaattaccgctgaatctatatcttatttagcagacctgcttaacataaaagaaataccttattcttatgagagaagatcgcaaatccctgaaatatcaattatattcttcggaataattaaagacagcattactcttaatgagcgatttgcccctaaaagtgatgaggaacttaaaaagttcacaaatgtttatactgattatgaacacctaaaattttggagcactactcccagagagttaatgataaaatatattaatcaaatgtcattcatccagtaaataatacgcccctgcatggggcgtattattaaacgtccatatctaatgttagatccagcattgaaaggcagccatcaataaatccttcggctaactgtatttctatacgtaccaatttctcatccttcccacgcacctttgcaatcttacgcttggatattctgtataaataatgtgccacaagaagcgaatgctcatcaggccttttttgctttaaacgagcaagacacccctcaacaattaatgcgtcattatcagaacaagccacacgtgtcttgcaggtatagggaagaagccctttaaacccagcagctataggcgaatagtccactcctgagctatcactcgccgcccatgccccccaacgctcaagaaccatctgaatatcacgcatcaactttctccaccaaatcaggccagcacgccaattgccagcgcgcgatcgataaaacgaaatatcaactccagttgagagccgtatttctcttcgaatgccacggtgtccgcatgtaactcattgtgatgcgttctgcacaacggcagcacaaagaggtcatgcgcctttgttcccatccctccctgaccgtagcctatcaggtggtgcggatcatccgcctgcttcccgcagcaggtgcacggctgggatttaacccagcgggtatatctctcattgacccatcgacggcgtttcggacgtaacatgaagctttccggcgattccggatcaaccctgagcgccagtacctttttcgccttatcctgtacaatgctggtggccagcaccgagggaacaatttcactttcacgggtagctgactggacaattgccttcggcatccttaatgcttttctcgcagcgctctccggtaagacttctgccaggttattgcgtaccatccaccagcacagttccgggagagtaactgcgtgcatatcgtcaaaacccagatcacgacaaacaaccgataaaacccattttgtcgtgttctccacagctattgatttcagccgttccgtaaactgttcgcgcagcaggttatcgcagtgccagcacagtcggattgcccccggagcgtggcgcatggttgtcatctgttcgctgtgccagtctgaatgcggccactgacagccattcccccggagtagccagctttccagactatccagaccaccagcacgatagataaccgactcattacagaacacatcacgaacagcaggatcatccgccagcggctgtgataccgccgggaccgcgccgctggcgaaagatgaaaattgctccggctctggttcaagcagaacacgcccctgcataaacaggggcatcagttccgatcccggcctgaacaatacaacgcccatacgaggagcaatttcaggggtcagtaacgctctcacgatcacctcaatgaacggtatcgagcagcttcagcagctcagggaatttggactcgaagaaatgcggctgcgtctcgcgagggtttgccgggctggtgatgtttttgccgaacatgcagccttttgccgtcagcgaccagaattttttaatgccgttaatcgcggagcgactgtaacgctcacgatgttcaacaacacccagctttgctaactgctgatacgcctgattagccgtcatccggatatttcacctgtacatcatccgtactgtctgatgttgttcgtccgggaatatctttgtcgcaccgcacctcattcacctggtgcatcagttacgacgccactgaacgttcagatagctccccagcatctcctccacaagaggtcgcaggccatccaaaaatgtctttttcgcgctctccatcgctcttgctccgatagtgcgctctgcatcggtattaccgaccagcccagacggtctcagctctgtgtcagacagcatccggtacgtttcctcataatccgatatttgcttttcacgaagcgcgttaacgcgttccggcgctttgcgctccagcactctgtgtaacggcccccactgcagtatccactccctgaactcgcttttttcagcggctttcacctgaagctccgcgtcctgaaggtctgtaaccgtcacgccggatacgtcaaagaaacgcatttctgacgtcacgctggtcagcccgagtgatttcttcagcttattctgatacgccagccagacctcaatttcatcaacgagagccagcgttctgaccttttcccgggcaatctgttccagttttcccagacggaacatctcacgccccgtggcaaccagcgccgcgagatcgttatcgtattgccctttttctgcattatgtaccagctgtacgttcttcatctggtgcaaaaaaaatgtgacccggtcctcgcagcttgaggttgcctctgttgccatagcaaaggtgtttgctcttaacgcctcatcttcagccagttgtgccagccaggacgatatctgtgccttaaaccccgcgtcctttatgaagttttccgtctcactcagtctgtccaggaagaggctgaatgcgtcggcgttatcttcctgtccgaacatatgccatctgtctgcaggagccggttccccctcccgggcaggcaccagccagtcagcggccgccaggtgcagtgcccgagtttcccggggggcggaggctcccgccatatcgaatcgtattatggggcctgaatagccaggcgcgctggtgatctcccgcagcgcctgcaaagtacgttcagacagtgggttcccttccagatttacggttgtctctgaagacagatgaatgagactttccggcaggcgggtcagctggttacgatagaccgacagcgacagtagtcctgacggcagcatcggcaggctggtcagccggttaccagataccatcagctccttcagttctgacggcagcaccggcagactggtcagccggttaccagatacaatcagctccttcagtcctgacggcaacgccggcaggctggtcagccgattattataggcccacagcttatataattctgacggcagcgtcggcaggctggccagttggttatcagataccgacagctcctgtagccctgacggcaacatcggcaggctggtcagctggttattataggcccacagcttacataattctgacggcagcgccggcaggctggccagttggttatcagataccgacagctcctgtagccctggcggcaacaccggcaggctggtcagttgattaccaaagatccacagcttacatagtcctgacggcagcgccggcaggtgggtcagcgggttactaaagatcgacagttccagtagtcctggcggcagcaccggcaggctagtcagctggttaccagagacctccagcgtccgcagttctggcggcagcgccggcaggctggtcagattattatcaggaataaccagtgtggtaatatgcgcgggtaaacagtctggcaaggtggtaagacctgattctcccacgttaagcactgcattgccattattcaggcaggcacgcattttctgtaccactgctgcacggccgcgtgactcttctgcgggtgcagcccttctccacgctgaccagacagcatcatactctgctggcgtctgtggagccgttgtggcagggaggaaggatgtcctgaatgtcccggatgccccttccgcgtgtcctgtgccctcctcaccctgtgctgtgtccagggtgaggcgatgtgtttcactgtacccctggcaatttacggtatagttcccggcatcatcaagggtgactgacaatatctcctgactgtcttcatccagaatacagaagtaattttccccgtgctggccggaatgaatgctttcctcccatccggcatacgcgagcgtcctgagcagttcaaatctgttgatcacatcctcccgcgtcgttccggccggcgggtgacaaatcgtccagatgcactccagcgcttcagtctggtgcgttgagcaaaaaaattccttcattttttcccaggaactcatttcagggggggtatcagaccaggcaatacgataaatgcggcgattactgatggtggcgggaagacatccgcttccaatatgaaagggcataacaaaaaacctttataaatttacatatagtatctgtccggcagacatcatctcttcctggtcttaatttcacaataaggttatcggcggattcatggtcgtcctgacatggcgggcttcagaaggtgcagaagaaaaatccgttatgatgaccggatggcgggactgtcattttacagctaaagtgtcgattttttcagggtcgctttccacgatgaccagatcatccggtatcaacgcccgggcgttcaattttcgattctgcctgcctgcgcagctcttccggcgaataaaccctttgaacgactttaccgtctttaaactgccagcagcatgaatatcagcgcgacggttttcatccgtatcaggcaactctgcaacgctctggccagcaggccacagcccggaaacatcacgcgtaatacacgtaataacatcgttatcgtcgtaggtaattttcagcgtgtctgctgaaaataattgctggcacccataccagtcctgaccatcctctgatttaagatacgccgcatcggcgaataatgtgtcatctggttccggtgcatacggaatgaaatttttaatatttaaaaactgtttgttctttttattttttttccgctgtcataattattccttcttatacacttggggctgtcacccacgtatcaccaaccagatactgaatgggacgttgtcacccgaatagtcatcgcgccacgcactcccattacctcaatcactgcgccagcgagacagatattaccgcagccagtatccgtgatgattttgttataagcgtaagaccaagagccacgacacatccagtaagggtgattgaatgcgccctgagactccagccagacgataaactccgccgtcgtccacggattatcatcacagccgataataactgcgccatcaaacgctcgcgcggcaccgatacgacgcacaaacaaatccttgtccggaatatcgccgccattctgtgatttttgtaatgcatcggcggcacgacttatggtttctcgcaaaccaacgtattcgataagaccgtcaacactttttcctgacagcgccgtcagggtttcgtccagcggctgcttgcccgccagtttattcagtaccgtggtggcaaagttcggatcatttcccaacgcgtcagccagttcctgcagggtgtccagtggctccagtacggaaccaaccagcgcggcaatcagtttgcggacaaactccgcgtttgttgtctgaagccctttagcatcgcctggcggcgtcggtgtggtcggcgttccagtgaatgccgggctgtccagcggcgctttggtccgtacctcacccataacggtttttaccgcctttggtgtggccgccagcgcttcgctgtcactgtccgtggcactgcttaatttaacgataccttttttcgtcaggcttgcatcttccagggaaatcacgtctgcgatatcctcggcccgtttcgcggcctcttcggctcaggttgccaattctccggctgcagctctgctttgcgctgccagtgatgcgctggtatcagatgcggcggcgtgggtggatgcctccgatgctgatgactaggcggctgccgccgttctggctgtgtcagccgacgccgcgctggctgatgcctccccggcttttgtggtcgccgtacctgcgctgctctccgcagatgctgcggatgaagctgccgaccaaaattccccttgaaaaccagcctgtcagggctggtttttttatgcctacaattaaaaagttagctgatgccagagacgttattttgcatgaactgattttgcatgaactgattggacatctttcctgtgcagtggtcacagtaaagtcaatgcaggcaactaacgtaaaccatgtttgtactaaaacagaaaaagcgcatctacaccctatactggaaaaaatgtttgcagtggcaggtaaatgagtaagcaatctgtcgcagcaataataaaacgttctggtaaggtaaacggcctaccacgcctttgtcgctaacaattagcctccctgtcgccatagggtcgataacgatcggctattcacaacacgttttgtagacaacgtacggtgattaattactccttcagccagcaactcgctaattgttattcaacttcagaaattataactaattgaagcacctacaaaattatgccctgaatttttatccgtaagtgatccattcgagaaatgccggatataagcttctgtagaaaaagccccaaagttccagccaagaaacgctttttctccaaaggtaaatgcagaattgacacgcatatcatctcgcgacttagattttatataagcccccagaccaataccggtatagataccagcgaaatgaaccagcgccacatccttcgagatacccaatacgccctggttatatttattacagggaacgctgccagaatgtttactgcaatcatcgctacccttagccttaaatcctcctaactccagattatttcttgcctgtaaaaagaaaaaatcgctgggttcactgtatgtcagaaaagccgtatataagtgctcaacccctcctcttcttatactttctcccgcagcaaaagagatctgatgcttgttgcccttgccaaaaaaaacattatcattagcagaacatgcgaatgcacaaggtaataatagatatataaatattctcttcatatacactccaccaccatttcaatgtcaatagttatttttaaccggctaacatatttaaaattttctacgccacgcttacgctcacagaaacggctgatatagcatccacactacgttctccccttgagtcgccccaacgggtgctcaaaacgccgcgagtgttgttcaggcacatccaggataagttataagtgaatgacactcatttctgaccacattttcatttatgataagaatatcgtcagaatctctttatcgcataaaaatacctctgctattgacttaatatttaatttaacagatgtcgcggtttattcgttctgctcagatgtatttcattgacattaataaaaccataaataaattcagttaaaataatttgttaataatgacaagctttagacgctatgacttttaataagaaatttcctgccagtaaagatagtctggacttacgggtgcaagggcgcagcaacatatgccacacttctgttatgtcacattgtccgaaaaaagcgtccagaccagtattcaacttcagggagtattctgttttctctcacaacgggttgttttatcctttctatcgttcagctaattactcgcctgtcacaggttttactacttacccatgcactaattagggtaaaatttacgcgcttgacaatgtggcaaatctggacgatttccgcgctgaaaacaataatcattctaataaaactcaggagatacagcatgcctgaagtaacaccttttcaggtgcttattgtggacgaccatccacttatgcggcgaggtattcgtcaattactggaactggacccggcttttcatgtcgttgccgaagcgggtgacggggcgagtgcgatcgatctggcgaatcgcattgagcccgatctgatcctgctggatctgaatatgaaaggtctgagcgggttagataccctgaacgcgctacgccgggatggtgtgacggcgcaaattattattcttaccgtctcggattccgccagcgacatctacgcgctgatcgacgccggcgccgacggttatctgctcaaagatagcgatccggaagtgctgctggaggccattcgcaaaggcgctaacggcggtaaagtctttagcgatcgggtcaatgaatatctgcgtgagcgcgaacggtttggcgcgcaggaagatccctttagtatcctgaccgaacgagagttagatgtcttgcatgagctggcgcaggggctttctaacaaacaaattgcgtcagtactgaatatttctgagcagacggttaaggtgcacattcgtaatctacttcgcaagctaaacgtgcgctcgcgcgtcgcggcgaccattctatttttacaaacacgcggaatgcagtaacaagccaggcccggtggcgccgcgccaccgggccgtcagggtcttatttctcctgcgccagccggatactgcgctctatcaccgcccgccgggcgtcacccgccggcagtaacttcagcatcatctcccaggccgccaccgcctcgccaaagcgctgctgctcaaaggcgctgaacgcatacaggcttaacacccggatatccgtgtggtcgcggctcaccagctgacgcagcagctccccgccgcggcggttatcctccgggtcggacgagcgcgtcagcgcctccgcgtagcccagcgccgcatcgcggtttttcgggtccagacggtaagcgtttgcataggccccggtggcggtaccggcattacccagtaccataccggtgcgccccagcatgagccagccctcaacattgccggcatcattctgcaggcgggtgcgcagccccagcgccagccgcgccatctcctcctcattcagcggctgcgcctgcgggtccagcgcccgcgccagcagtcccggcgtctgcgccgttgcctgctgccaggccctcacctgcggatagctgccggtctgtgagtaactgatggcggccacgaccagcgccataaccacgcccggcacgtaagcaccccacccggcgcgcggtcccgccgcaggaatggcgtcggccaggacgtcctgtctgatacgcacccgccggcgcgtgcgggcgacgattatccacccgcccgccacgatggtggccagcggcagcacccacagcagcaccgtcagcggggtcagcggcgggtcgtaggtgacaaagttgccgtagcgcgccaccatgtaatcgatgatttcctggcggctcttcccctcctgcatcaggtcatacaccctgcggcgcatgtcggtggctatcatcgcgttcgagtccgcaatgctgttgttctggcatttcgggcagcgcagctgctccgtgagctggcggaactgctgctcctgcgcttcatctttaaacggcatcacgtcggtggtcgcccgcgctgacccggcgataaccagcaccagcatcagcatcaccatgcccggtaacagtctcattgcgccgcctcccggctgtatctgtcccacagcggtttcagttcactttcccatacccgggcattcaaatcgcccgcatggcggtagcggataatccccctgccgtcgatgaggaaggtttccggcgcgccgtacacgcccaggtccagccccagcatcccgtcgctgtccgataaactcagcgcatacgggttgcccagttcctttaaccaggccaccgccttcgcccggtcgtccttatagttcagccccaccacccggataccctgcgcagaaagctggttcaggtactgatgctcggcgcggcaggtcgggcaccaggtggcccagacgttaagcagcaccggtttcccctgcgtcagcacctccgcctgatagtactgacccggcgtctccagtgattccaggcggaacgccggcaccggctttccggtcagcgccgattcgagattcgtcgggtcatccccctgcgcgttgcgcgccagctgccacagcagcgccgcggcaatcagcagaaaaatcagcagcggtaataacagtacgttgcgtttcatccggcctccggcaatggtttacggcggcggtagcgcgggtccgccaggcacagcagcccgcccagcgccatcagcagtcccccggcccatatccagcggacaaacggtttgtagtacaggcgcacggcccacgcgccgttgtccagctcctccccgagcgcggcgtacaggtcgcgggtcagcccgccgtcaatcgccgcctcggtcatcaccatccggctggtgttgtagagccgtttctccgcgtgcagcaccgcctccggctcgccgtggcgcgtcaccccgatgagggccaccccgccgcggtagttgggcccggtgatgtcccgcacctcccggaaggtgaagcggtagtcgtgaatggtcacgctgtcgcccgcccgcatccgcacgtcacgctccacgctgtaattctggctgaaggcgatgccggtaatcgtcaccgccagcccgaggtgcgccgccaccattccccagtagctgagagaggttttcgtgccgcgggacacgcgctgtacggcttcggccaccgccagcaccgcaatccagcaggccatcgccatccccaccgccgtcatggcgatgattttatcttccagcagccatggcaaaagtaccgacagcaccagggtggagaccagggcggtgagcagcagcgtcctgatgttacgcggccggtcccggccccagcgcaccagcggccccacccccagcagcagggcaaaggggaccatcagccaggtgaacatggtgttaaagaacggctcccccaccgaaatgctgcccagccccagctgtttgtgcaccagcggcagcagggtgcccagcagcaccaccagcatggcggccatcagcaggacgttgttgccgagcagcagcgactcgcgcgaccacagcgcgttgttcacccgcgaacgcaccctgtgcccgcgcacggcgaacagcagcagcgagccgccggtgaccagcaccataaaggcgaggataaacatcccgcgcgccgggtcggaggcgaaggcgtgcaccgacaccagcaccccggagcgcaccaggaaggtgcccagcaggcacagcgagaaggcgcagatggacagcagcagcgtccacgccttaaagccggcgcgctgttcggtgaccgccagcgagtgcagcagggcggtgcccgccagccacggcataaaggaggcgttctccaccgggtcccagaaccaccagccgccccagcccagctcgtagtaggcccacgccgagccgagcacgatgcccagcgtcaggaacacccacgccgccagcgtccacgggcgggcaaaacgggtgaacgcgctgtccagacgcccgctcagcagcgcggcgatggcgaaggcgaaggccaccgagaagccgacatagcccatgtacagcagcggcgggtggaaaatcagccccgggtcctgcagcagcgggttcaggtcgcgcccctccaccggaaaggccggcagcgtgcgggcgaacgggccggaggtgaacaggatgaacgccagaaaaccggcgcagaccatccccatcaccgccagcacccgggcgacgatatccgccggcacctgccggctgaacaccgccaccgccagggtccagccgctcatcagcagcacccacagcagcagcgagccctcgtgcgccccccaggtggcggccacccggtaccacaccggcagctgcgtgttcgagttgccggcgacataggccacggtgaagtcgttaaccacaaaggcgtgcaccagcacgaaaaacgcgcccgccacgcagataaacagcagccaggcgaacaccccggccgacgccatcatccgcgcgtcaccgcgcgccacgccccacagcgggtaaacggacagcagcagcgccacgccgagcgccaggcacagcagcgcgtggccgtattcaggcatcatgatgaggtgtccttatcagcgcgttgcgggcggcggtggttttcctgcatcgccttttccacttccggcggggtgtagttctcgtcatgtttggccagcacctcgtgcgccaggacgtggttgcccttctccagggtgccctgcaccaccaccccctgcccctcgcggaacaggtccggcagtatcccctcatagctcaccgtcaccgacccttcggcgtcgtagagactgaagttcaccttcagcgagtccgggtcgcgcctgacactgccgggcatcaccatcccgccgacgcgcaggcgctggcccgccgccggcagctgctgcgtctcgcgcttgccgtagaggatttcgccgggggtatagaacaggtcgatattcgcgcgcagcgcgtacaggaccagggcggtggtcagccccaggcccgccagcaccgcgcagaccacccatagccggtttttacgtcgcaggttcacgcggcctcctgttgcgcctgtgcggcacgcatccgcgcctcgcgcgcccgctgctgcgccacgccgcgcagaatggcccggcgctgcagcaccgtgtgcagcgccagcagcgccagcggcgccacggtcatcgccaccgccagccagacaaaaaaggcgtacccgcccatggcgaaaaaatcgctccacgatgaaaatgccggactcaccggtgcccccttttcagtatcagttcgctcacccacgggcggcgtttttccatcagtaaaatcaggttgcgcatccgcatcagcgaaagcgtcataaagagcagcaggtagccggcgatggcccagcgcagcggcgagcgcatcgccgggtcgatactctgctgcatccgcgtcgagccctggtgcagggtgttccaccactcgacggaatagtggataaccggcaggttcaccacgccgaccagcaccagaatgcccgccgcgcgcccggccattttacggtcgtcaaaggcgtgccacagggcgatgaccccggcgtagagaaacagcagcaccagctccgaggtcaggcgcgcgtcccacacccaccaggtgccccacatcggtttgccccacgccgcgccggtgaccagcgcgatgaaggtgtacaccgcccccaccggcgccatcgccgcgacggcaaggctggccattttcatctgccagaccagcccggtgaacgccgccaccgccatcgccgcatagatacccatcgaccagatggccgccgggacatgcaggtacataatgcggtagccctccccctgctggtagtccgccggggcgaaaccaaagccccggacccagcccgtggccagcacaatgatgccggccgccgccagccacggcacgagcctgccgcaaatctgatacagccggggcggcgccgccagctgatgaagggttttccacatagtcgtcacctgacctcctgaaaccagtaaaatgtccgtcgcgccggggcgctactgcacgctgaggcgcagcgccgccgcggtggcgaacgggcttaacgtcgcgctgcccgccagcagcgctcccagcaccgccagatagccgtcagcgggtaaatgcatcgatgccgcgtccatcgccgcggcggcgaaaatcagcaccgggacactcagcggcagcaccagaatgcccagcaggacgccgccgcgccgcagcccggccgtcagcgcaacgcccggcgcggcgagaaaccccagcgccggcgtgccgagcagcagcgtcagcgccatgattttccagccgtacacgtccatccccagcagcagcgccaccagcggggagagcataatcagcggcaggccggtcaccgcccagtgggccagcaccttcgccagcaccaccgccggcagcggcaccggcagcagcatcagctgctccaggctgccgtcctgcaggtcgtcgcgaaacagccgctccagcgccagcagcgaggccagcagcgccgccacctggatgatgcccggcgcgatacgcgccagcagctgcggctgcggcccgacgcttaacggaaacagggtgatgaccatcaggaagaaccacagcgggccggcgatgtccgcgccgtggcggaacgccacgcgcagttcgagacagaagacacgccacatcacagcccggcccccccgccggtcagcgccaggcggcggacggtgtccgcggcccccggcagcggctggtgggtggtgagaatgaccatcccgccctgcgccgtgtgcgccgccatccgccgggtgaggcgcgccacgccgttaacgtcaatggcggtgaacggttcgtcgagcacccacagcgcggcgcgggtcagccacaggcgggccagcgccacccggcgctgctgcccggccgagagctgagcgaccggcacgtcctcaaatcccgccagcccggcctgcgccagcgcctccgggagacgcgcgccgtcgccggggtggaagaagtgcaggttctcccgcgccgtcaggcgggttttgatccccggctggtgccctatccacagcagactgcgatggaagctgtcgcgcacgcggcgcaggggttcgccctgccagtacacctccccgccgtccgggcgcgccagcccggtcagcaggcgcagcagggtggtttttccggcgccgttgccgccggtgacctgcacccactccccggcctccacggtgaacgacagcccgcgaaacagcgtcctctcgtcccgctcgcagtacagatctctggcttcaagcattcccactcatcaacgtcctgtcagaaacctggtttaacatcacgcatatccggcagtttatgcgcgatccctttgtggcaatcgatacaggtctgtccatcttttaccgcctgatcgtgcattttcgccgcgacgcctttttgcgcggtcagatccataaagtcgaaattgtggcagttacggcattcctgcgagttgttgtctttcatgcgccgccactcattttgtgccattgtcaggcgatgagcttcaaatttctgcggtgtatctatcagcccaaataccttcgcatacagctctttactggctttgatcttacggatcatcttcggcccccactcatgcggcacatggcagtcaggacaggtggcacgaacgccgctacggttgttgtagtggacggtttccatatactcctcatacaccgtgttgcgcatttcatggcagctaatacaaaactcttcggtgttagccttttccattccggtattgaagccgccccagaagatgatgccgccgataaaaccgattaacagcagcgtccccaacgccaggcggctggggctgcgccaccatcgccagacgcgctttatccagccgggtttacggttagaattttccataatgacctcttatttcccgtaaccttgcgagggggtaaaggtattgtcgataatcggcgcggtatcagactgcggtacgtggcactgcaggcagaaataacgacgcggcgcgacgttgcccgacactttaccgtcgctgtccataaagtgcgtcggactgatacgcggcgcgcccgtcgtacgataactttccacgccgtggcattgcagacagcggttggtattggtcgtcacctggtagccctcgacgctgtgcgggatcatcggcggctggttgacgtaatttagcggcatacgttcctgctctttcggcatacgaatcgccccttcctgcgtcccggatacttccggcgactggctcagatccactccgtttgccgcccaaaccgcaccacttaccaccagggcaagcgtggccatccattgacacagcgctttcatcaggtcatggcttttcattgtttcgctcccgaactccatcgcatttacacttcatccttcgagctgcctctttgttggctgcgctcgaaaatcccagtcacatcgttatctatgctcccggggatttcctcgcttaccgccgcgatgcatcccgaatgatgttgcgtatcgttattgtaaaaacatcctcagaacagacatccacgcagcgaccgcaggtcatgcagtcgcggtgagtgacctgcgccgggctttgctcatccagcaccggcgcacgtagcacatgcggttccgggcaaacatgaaaacaatccatacagcgattacatttctcacgttttttggccgtcacggtcactacgcctttactgcctagcacgccatacagcgcgcccatcgggcaaatatgaccgcaccaaccgtgctcaacgactaataaatcaaataaaaacaaagcaataatcaacaacgcgccgctactaaatcccataatcagactacgacctaacagcgacacgggattaatccattcccacagcagcgtgccggtcaacgccgaaccgattaacaccaccaccagaaggacgtaccgtatatggcgtggaatcgtcgcagactggttcaggtcaaatttcctgcgcatccagttagccaaatcggtaacggggtttagcgggcaaacccaactgcaaaataatcgctttcccgccagcgcatacagcacagcgataatcactgctcccgtcagcgccacggtagcgggaagatgtccactggcgagactttccagggtaatcagcggatcggtcaacgggagggtatcgaacagcaaactactgctgtagttgccatgcaaaacccaaaagcccagccacgggccgctgagaaacatccccagcaccataaactggctgatacggcgtaacaccagccaacggtggctacgccaccagccttttttcgcccgcgcttctcgcccggcgtcgcgtttacgatttgccatctttcccctccagccagccgaagcggtaatggtgtcctaactcccctttcgccaatgacaacggcaacacttttatcgctggttgctccagtacgcagactttttcgcatttgccgcagccggtacaggcgtcgctgtgtacggtgggcagaaagcgcgcatgtttgccggtgcgcatgttgcgatccagctccagcgtgatggcctcatcgattttcgggcattcgcggtaacaaacgtcgcagcgcagcccctgaaagttgaggcagttttcctgatccagcagcaccgccagccccatgcgcgagtcatcaatggaggcgatatctttattcagcgccccgctggggcagactttggcgcacggaatgtcttcacacatttcgcaggggatgtcgcgagcgacgaaatagggcgtgcctgccgatagcccggaggccagcgtcgccagttttagcgtgtcgtatggacacgcctgaacgcactgcccgcagcgcacacaggcgctggcgaagacattttcattcagcgcgccaggcggacgcagccgcacgcccgatgcgcgcgcggtttgctgttgcaagcccagcgccacgccaaccgccgccagcccgcccgcagtgcgcacaacatcacgcaggaagcggcggcggccattttggggtttcgctgtacgggacataacgcgttacaccttcgccagcttaacggcgcacttcttgaagtccgtctctttagagagcgggtccgtcgcatccagcgtcaggttgttcactagctgagcggcatcgaagaacggcatatacaccagtccctgcggcggacggttacgtccacgcgtttcgacaatcgaaatcacttcgccgcggcgggacgacactttaaccttatccccacgacgcagatcgcgcgctttcgcatccagcgggtgaataaagaccaccgcttccgggaaggcgcgatgcaattcaggcacgcggcgcgtcatactgccggtatgccagtgttccagcacgcgaccggtggaaagccacagatcgtactcgttgtccggcgactccgccgcgggttcaaatggcagcgcgaagatcaccgctttgccatccggtttaccgtagaatttgtacccttcccccgcttttacatacgggtcgttgccttcgctgtaacgccattgcgtctctttgccttccacgaccggccagcgcagaccgcgcgcgttgtggtaatcgtcgaacggcgccagatcgtgcccgtggccacgtccaaaccaggcgtattcttcaaacagccctttttgcagatagaagcccagctcacgagactcatcgtttaactgatcctctttcagctcgctcagcgggaatttgctgaccgccggcgtggcgaacagaacgtcatacagcgttttgccgcgcagctccggcttctgagccaacaacgcctccggccagacctcctcggttttaaaacgacgggagaactgcaccagttgccagaggtcggatttagcttcgcccggcgctttaatttgctgacgccagaactgcgtgcggcgttcggcgttgccgtaagcgccttctttctcaacccacatggcggtcggcaggatcagatccgcagacagcgcgctcaccgtcgggtaaggatcggaaacaatgataaagttacgcggatcgcgccagcccggcatccgatcttcattgatgttcggcccggcctgcatattgttattacacattacccagtagacgttcagcttgccgtctttcaacgcgcgatcctgcgccaccgcgtgtaaacccacttttgccggaatagtgccagcggggatctgccagtgtttttcgcagatatcacggtgtttttcgttcgtcacgaccatgtctgcgggtagacggtgtgagaaggttcccacttcacgcgccgtaccgcaggcggaaggctggcctgtcagcgagaaaggaccgcagccaggctgggagatttttccggtcagcagatggaggttgtaaaccaggttattcgcccacacgccgcgggtatgctggttaaaacccatcgtccagtaagagatcacgcgcttattcggatcggcgtagagctgtgccaactgttccagttgatctttcggcacgccggtcatttcagcggtcttgtccagcgtatattctgccacgaaggctttatactcgtcgaagctcatcggctcggaagcgtcggagcccggattcttcgccgctttttccagcgggtgcgtcgggcgtaagccgtagccgatatccgtcgcccctttacgcaggttcacatgctttgtgaagaaatcctgatttaccgcgttgttctgaataatgtaattcgcgatatagttaaggatcaccagatcgctttgcggggtaaagacaataccgttgtccgccagttcaaagctgcggtgctggaaggtggagaggacggcaaccttcacgttcgggtcggacaaacggcggttagtgatgcgcgaccataaaatcgggtgcatctccgccatgttggaaccccacagcacaaacgcatcggcctgctcaatatcgtcgtagcagcccatcggttcatccatgccaaaggtgcgcataaagcccaccaccgccgaggccatgcagtgacgcgcattcgggtcgatgttgttagagcggaaaccagccttgaacagtttcgcggcggcatagccttcccagatggtccattgacccgatccaaacatgccgatcgcttctggtcctttctctttcagggaggttttaaacttctcttccatcacatcgaaggcctgttcccagctcaccggcgtaaactcgccgtctttgtgatagctgccgtctttcatgcgcagcatcggctgcgtcagacgatctttaccgtacatgattttgggcaggaagtagcctttaatgcagttcagaccacggttgaccggcgcgtcggggtcgccctggcaggcgaccacacggccctgctgcgttcccaccaacacaccgcaacccgttccgcaaaaacggcacggcgctttatcccatttgatggcttcctgctgcccgacaacggcgcgggcgacgcccggcacgctcagaccggcagccgccgcagcggccgcaacggcgttagctttcataaagctacgacgactgagtttcatggtgtttcctcaccttgctcatcctgctggtgataaaccagcgacaccgccagtacgccctcgacattgcgtactgactcaattgtttgcatcagcgtttcactctgatctgcttccgccaccacgatcagttgcccgctttcaacatcgcttaacgcgacttcgcaacccggcaacgtgttcaactgtgtgccaatggcggcgatgttctgacttttggcctgcacgaccaggctacagacctgccagttagtgcgcatggtggttctccgctttgatggctgacacggggcagatagccacacacgccccgcatccgttacaggcctgcgagtcaagctgcggctggtaaataccggataacgtgggacgaaaggtaatggccataggttcacaactgtcctggcaacgatggcattcaaccgattgcctggcgaggcagttttccgtgagcgtaaaaaccagatcccaggccctggtgtggcgcggaagaaaaagcgattcggtacaggcctgcgcacaggcataacaaaagctgcactcgccccgtttgaaatctacgctcggatatccccccgcccctcgctgcaggatgtcggcctcacacgcctggatgcaggcgtcgcaacgcagacaatgtgcgagaaaataggtcgtttctctggcccacggcggaagaatcccattgctggcgttgcgccaactgccggtcaacatgcttcgacgggataaatcaaccatgatatcgcccttccataacgacacgcttccatagggagtgaataccaataaaaaccgtacaatttatgagtagttgtttttgtaaataagatatttcaggatgtgtaagagatgcataccccgatagaggtaaatgctgttgccggatcaaaagagtgccgggtaaagacccgtaaacgtgctttttctcacatttcaatgagttatatagatatttatataacgaaaaccactaatagctgataatttcatttacattatcaatatcagaatattccactatataaaaagacgctattttattaataatcttgaaaatatgagtaaatacagattaatagataatatgaatgtgttaatctgttgtcagtgaataccgaaaacagcagaaaggaaatactgtgaacaatcaaatgaagatgtttgtccctgccgtcgtcttcgccgccctcgccagcgcctctgcctgggctaacaatggcgataccgcccagccgctggaaaaaatcgccccctatccgcaggcggaaaaaggaatgaagcggcaagtgataacccttacccctcagcaggatgaatctaccctcaaagtggaactgttgattggccaaacgctgaatgtggattgtaaccagcatcgcctcggcggcacgctggaaacaaaaacgctggaaggctggggctatgactattatgtctttgataacgtcacctctccggtatcaaccatgatggcctgccctgaaggtaagaaagagcaaaaattcgtcaccgcctggctgggtgaagacgggatgctgcgctacaacagcaagctgccgatcgtggtgtataccccggcgaatgtggacgtgaaataccgcatctggaaagcggacgctaacgtacagaacgccgtcgcgcgatgatgttacgctgcccggtcacacttaccgggcatctgaacacgccgactcacgcagcgctccggggttctttttaaaacacgtctggaaacccgctcgcccgcagcaaaaaataccccgatgcctggtggcgacgcgtggcatcttatcaggcctacccgcgtgcggacgtagggctgccatcaggcggtttatccggcgccataatccattacgcagtacgcgcaaccgcatcacgcgaagcggcgtcacgttcgtcgccggtgagttcggttaactgcccgttacgcatttcaagcagacgatcggcgtgaataaaatagtgatcatcatggctgatggcgaaaatggttttgcccatttcctgcattaacggcaacagtacctgataaaactcccggcggaaatgcgggtcctgatcggcggcccactcatccagcaaaataatatcgcgctcttccgccagcgccagcagcagtgcaatgcgctttttttgccctttcgacagtttaagattcaagatgcgcccgtcgtttagttccagcttgtgcgtcattttcaggtgctcaagccacttttcgaccagcgcgggattggcgggtttcccctgcggccccagcaggcggtcgaataaccacacatcggtgaacaccgcagaaaacagtttgcgataatcttccggctgcccggcggcaataggttgaccgtcaagtaaaatcgttcccgattgcggctggtataaaccggtcaataacatggccagcgtcgatttcccgctaccgttgccgccaattaaaaacagcagttcgccgcggtgaatcgtcaggttgatgggccccacggaaaacgcgttatcctgatagtggaaaaccacgttgcgcagctccagcgtcttccagtcgggaaaggctttcggctgtggaaaatcaggcttatacggggcgagcgcgaatttattcagtttattaaacgccacctgggcggtcagtagcgttggcaacgcccccaccgcagacagcagcggcgtgcgcaggaacagcaacgtcagtgaataggtcgccgcgacgttggtatccgcccagccgagactattcgccatccagaagaccaggcctatcgctcccagcatcatgatattcgaccagttgacggcgctcagatgaaaagtatcggcacggataatgtgatgacggtactctttggcgtccggggtatagcattgctgaaaaatctgctccgcacgctcgcggtttagcgtcagctctttgcgtccttccagcaccgtctgatagtcgttgtacagcttatcttcggtctcgcgcagggtcgccatatgctggtaaacccgcgccaccagcacaaatccgccccagatagtgaccaccatccagatagccgtaaccagcagcatttttgtcgatagcatcgccagatacgccgccgagccgacggtgaggataatgccctgcaccagctcaggcagacgcacaaaggcgatagtaatattgcgaatatcgctggtcagaccggccagtaaagaggcgctgcccagttgctcaatgcgttcaacgtgcgtatccagaatgcgcttgataaattcgctgcgcaggcggtaaacgaaatggtgtcccagagtggtgagcgccagttgggaacctaatgtgacgaccattagtaacaggagcagaccgagaaattccggcagcaccatgacggtggtgtccaccgtttcaatcaggcgctgattgataaacgcgatcaggccaatccccagcgccgcgctggcgaggctcagcgccatcacgctaataaatggccagcggtactgccgccagacaagaataagaagttccatgcatacaacccggaccgataataacagcccgcagtttaactaactccacctgcacagcaataataattcttatttttattctttttcagctgcctgacggaaggtgagattgtaacgaaattcaccggtcatgggatgaaagcccgctttaagcggctggataccatgataaaacagccgggactcgccgccccagaccacgatatcgccatgctccagtaagatccgctggatcgggtcgctgcgacgcaggccgccaaactgaaaaaccgccggcacccccaacgaaactgagacaataggcgcgcgcagatccggctcgtctttatcctgatgcagcgacagttttgcgccgggcgcgtagcgattgatcaggcaggcgtccggttggaagctcgcataccctgccgcgattgccgcctgacgacatacgctggcaaacgataacggcagcgcaggccagggtttatcagtcaacggatcgcgcacggcataacaataaccgtgacgatcggtagtccaccctaacgcgccgcagttggtcatcgccaccgacatggtgtagccgcccggcgtcaccatctgacgaaacggagactgactggcgacaaacccgatatcgtctaatagcgactgcgccgcgcgaaacgcaaagcggcgcaacaccaccgcgccaggcgccaggggctcttgccagggcgcttcatcagcaaatagatccagcattgctactcctctttttgcgcttctcgctttaatagctgcgcttttcgacgcacgccccaacgataaccggagagcgcgccatcgcgacgcacgacccgatgacacgggatcaccatcgccagtttattcgcgccgcacgcgctggcgaccgcgcgtaccgccgtgggtttgccgatagtcgcggcaagctgttgatagcttacggtttcgccgcagggaattgcgcataacgcctgccagacctgctgttgaaacgcggttccctggatatccagcggcaacgagagcagcacatcgcgtgtgttgatagccgcgacaacctgccgcacccgttgctgaaaaagcgcgtcagcaggttcgtggcgggccgacgggaaaagggtgtgtaattcagccagtagcgcgtcgtcgctatcaccggggagaatcgcgcaaatcccccgctcgctctccgccaccaggcaccgtccgtaaacccagtccgtcagcgcatagcgaacggagacattatcgccgcctttgcgaaactgttttgccgtcatgcccagcgtctggtcggcatgacggtagtagctactgctatccgggaagccagcgcggtaaatagccgccgtgatcggctctcctttcgccaaagcctcacgcagccgccgggcgcgccacgcctgctgccaccctttcggcgtcattccggtgctcgctttaaacagacggtgcagatgaaacgggctcatcgccaccgcctgcgccagaaacgccagcgttaccggcgtctcctgctcaagcaaacggcaggcgcaggcaatcttatccaaccgccgttgctgcgcgcgcgcattatccggctgacagcgcttgcaggggcgaaaaccggcgtccagcgcctgctgcgcgttggcaaaaaagcgaacatttttacgtaacgcccgcttcgagcgacaagaaggacggcaaaaaacgccggtggttcgcaccgcaaaaacgaaacgcccatccgcgctggcatcgcgcgcctgcacccgcagccagcattcatcatcgataagtaacgcttttttcatcatagactccttcattaagcatagtgcttgcttacatgcagtgtgtccgtaaatccgcccacaaaaacccgtaatcttgcgttttaattcttatcgctcaccaggaacgttttgaactgcggcgacatccaggttttaaagccttcaccttctttcatgatcataaataccgccagcccttccctccgcacgacctcttgcgccttttgcgtaccaagcaccatcaggccggtgtcccagccgtccgcttccaacgccgttggcgcgatgaccgtaaccgataccagattgtgttcaatggggcgccccgtttgcggatcgataacgtgcgagacacgcttgccatccagctcgtaatagttacggtagctgccggaggtgctgatgccatgcccgttgatatccacaatcgcctgcactgcgttttcccggtcggtcggcttctgaatcgcgacgcgccacggctgcccctgcgcattcatcccgcgactgcttaatgcgccgcccaccgagaccagataacgcgcaatgccctcctgctccatcagacgcgccagatgatccgccgcatagccctccccgaccgtggagagatcaacataaagatccggcagatctttttgcaaaaactgatgtccagccctgtcgataacctgcaaatgttgcaggcctgttttcgcttttgccgcatcgatttgtgctggtgttgggatatgcagcggctgccgatccggcccaaacccccacagattgaccagcgggcccacggtgatatccatcgcgccatccgtcttcgcgccaatacgcagcgccgaggtcacgatatccgccatggcttcgctgaccggccagggcgcaagactgcgtgaatggttaaaacgcatcaacgcggagtcatttttataggtagaaagcaaccaatcatcagcatcaagctgagtctggattttagtctgtaactctgcggcgcgtttcgcatcgataccaaccacgctcacccgccagagagtccccatcgttttaccttccagcacctgagcggcaggtgacgctgttgtcgtttcgggagcctcatcgcagcccataagtagaaaagccgccgccagacacacggcccggcaaaaagtcattttcatcgctgtttatcctcattcgaatggacgcaagcgtatatcaaaacgtcgtatttgtacgccggaataaggcatgaaaaaagggcccgcaggccctttagcaacatcttttgctgattagaactggtaaaccagacccagcgctacgatgtcgtcggtgttgatgcccgcatcgcgggtaaagtcgtttttatccagcaggttgattttgtaatcaacataggtggacatgtttttgttgaagtagtaagtcgcgccgacatcaacgtattttacgatgtcctggtcgccatagctggcgccgtaaccgttgctgatgtccttacctttagactgcaggtaagccacagacggacgcagaccaaagtcgaactggtactgagcaaccacttcaaagttctgcgctttgttggcaaaaccgtaagaggtggacgggttgctaccgttagaggtaccaaaacgggttgcgttataggtctgagaatactgcgctgccagatagatgttgttcgcatcgtatttcaggccgccggtgtaaaccgtggcgcgatcgccgttaccatacaggcgagcgttagcggtgttgttctgatcggcagtacgtttagacgtggtgatagcgccaccgacagagaagccttcgccgattgcataagtcagcgatccgccgtaaccgtcgccgttctggttcagcaggctgcgaccgttggtgttttcaccgctcacgctgccgtttttgccctgatactgtaacgcgaagtccagaccatccaccaggccgaagaagtcggtgttacggtaggtagcatagccgttaccacgctgctgcataaagttgtcagcgccgtaggtgtcgccgccgaactccggcagaacgtcggtccaggaggtcacgtcataggttacgccgtagttacgaccataatcgaaggaacctgcatcagcgaatttcagacccgcaaacgccacacgcgtccaggagtcgttgctgccttcagtctggttgccctgaatctgatattcccactggccataaccggtcagctgatcgttaacctgcgtttcgcctttgaagccgatacgcatgtaggtctggtcgccatcgctgcctttgtcgtcagagaagtagtgcaggccatcaactttaccaaacaggtctaatttgttgccgtctttattataaatttcagccgcattcgctgcgcccgccaccagcagagctggtaccaggagggacagtactttaactttcatgttattaaccctctgttatatgcctttattgcttttttatgccactgcttactggttaaccctcattaaccagtcggcaagtccattctccgcaaaaatacagaataatccaacacgaatatgatactaaaacttttaagatgttacagttatctacatagatgtttcaaaatatgaattttacggaacttttttaaagcaaaaatcaagtaaaaataagcacaaatagacaaaatatattcacgaaacttttaaaatcaacgggttaaattgatgaaattcatagcactgaatgataaaacagaatcttcattcgcaactaaaatagtgaccgctatcatcattaactttatttattaccgtcattcacttctgaatgtctgtttacccctatttcaaccggatgcttcgcattcggttttttttaccctttttcagacacacccggctgatttatgctacctgcctaaaactatcacggttattcactacactcccctgctcgaccgttcgtaagacattagcaaataatttcttgatatttagtgctaaacatttataagtagtctttatatttgtaccgttctgcgaaggttgtacgcttttcccgtcccgccgacggagcgcgtgttaagttgcccggcatgacgtaagagtctggaaattcattcattaccctttatactgcccttcaccttcagcgttgcttttacaggtcgtaaacataaatgagtcagtctgacacaacggtctctacccgattctcccttctaccgggaagcattacccgtttcttcttattgctgatcattgtgctgctggtaacgatgggcgttatggtacagagcgccgtcaacgcctggttgaaagacaaaagctatcaaattgtcgatatcacccacgctattcataaacgcgtggatacctggcggtatgttacctggcaaatttatgacaacatcgccgcgaccactacgccatcgacaggtgaaggacttcaggaaacgcgtctgaagcaggatgtgtattatcttgaaaagccgcgacgtaaaactgaagcgctgattttcggttcccatgacagcgccacgctggaaatgacgcagcgtatgtcaacttatctggatacgctgtggggcgcggaaaacgtgccgtggtccatgtattacctcaacggacaggataacagcctgattcttatctctaccctaccgttgaaagatctctcttccggctttaaagagtccactattggcaatatcgtcgattcccgccgggcagagatgttgcagcaggcgaatgcgctggatgagcgcgaaagtttctcctcattgcgaaaactggcctggcaaaacggtcactattttacgctgcgcacgaccttcaatcagccaggacatctggcaaccgtggtggcgtttgatctgcccattaatgatttaatcccgccgggaatgccgctggacagttttcggatagagcctgacgcaacccaagcgacggggcgaagcagtgaaaaggaagcgcctgatagcgtcacgattagctttaacggttcaaaaattgagatctcctcagcgcttaactctaccggaatgcgcctgatctggcaggtaccgttcggtacgcttttgcttgatacgttgcaaaatattttgctgcctttactgctgaacatcgggctgctggcgttggcgttatttggctacgccacgttccgtcatcagccgggacggtcgacggaatcgacatccggcaacgcggcgaataatgagcttcgcgtcttacgcgccattaatgaagagatagtttctctgctgccgctgggtctgctggtctacgatcaggaaggcaaccgcacagtgatcagcaataaaatcgccgatcatctgttgccgcatcttaacctgcaaaatattaccagcatggcggaacagcatcagggcgtgattcaggcgacaattaataacgaactgtatgagatccgtctgtttcgcagccagatcgctccccgcacgcagatctttattattcgcgatcaggaccgggaagtgctggtgaataagaagcttaaacaggcgcagcgtttgtatgagaagaatcagcagggccgcgccgcctttatgcaaaatatcagcaacacgcttaaagagcccgtacgccaactggcggttaacgccgcagcagtcaccacgccggaaagcctgaaactggcggatcaggcggatgtattggtacgtatgatcgatgaaatccaactggcgaatatgctggaaaatgacgcatggaagagcgaagccacgctgttctccctgcaggatcttattgacgaagtcgtgccggaagtgctgcccgccattaagcgtaaagggctgcaactgctgattaataaccatcttagcggcaacgatgaacgctggggcgatcgtgacgccctgcgccggattttgctgctgttgattcagtatgccgtcacaacgaccgctatgggtaaaattacgcttgaagtcgagcaggatgaatctatcgcggagcgtctgactttccgtattctggatacgggcgaaggtgtaacgttaaacgagattgataatctgcatttcccgtatatgaatgaaacgcagggcgatcgttacggcaaagcgaatccgctcaccttctggctgtgcaatcaactggcgcgcaaactgggcggtcatctcaacattaaagcgcgagaaacgctgggcacgcgctataccgttcatgtcaaaatgcttcctcacgatcagcatactcaggtcgaagagcgcctgctggacgacgtgagcgtgatggtcgatgtgacgtccaacgaggttcgcgcgattgtgctgcgtcagttagaaaactggggcgccacctgcatcacgccggatgaaaggcagataagtcaagaatatgatctctttttaacggataatccgtctaatcttactgcctcgggcttgcttttaagcgatgatgagtcaggcgtgcggaaaattggcccgggtcagttgcgcgtcaactttaatatgagcaatgctatgcaggaagctgtactacaacttatcgaagagcagctggcgcaggaagagattcccgcctccccgctcggcggagatgaaaatgccgagcttcatgccagcggctattatgcgctatttgtagacacagtaccggatgatgttaagaggttgtatactgaggcggcaaccagcgatttcgctgcgctggcccaaacggcccaccgcctgaaaggggtgtttgccatgcttaatctggtacccggcaagcagttatgtgaaacgctggaacatctgattcgtgagaaagatgctccaggtatagaaaaatatatcagcgacattgacgcctacgtcaaaagcttgctgtagcaaggtagcccaatacatgaacaatatgaacgtaattattgccgatgaccacccgattgtactgttcggtattcgcaaatcacttgaacaaatcgagtgggtgaatgttgtcggcgaatttgaagattccacagcattgatcaacaacctgccgaaattagatgcgcatgtgttgatcactgacctctccatgccgggagataaatacggcgatgggatcaccttgatcaagtacatcaagcgtcattttccgagcctgtctattatcgttctgaccatgaacaacaacccggcgatcctgagcgccgtgttggatcttgatattgaagggatcgtactcaaacagggtgcgccaaccgatctgcctaaggcgctggccgcgctgcaaaaaggcaaaaaattcaccccagaaagcgtttctcgtctgctggagaaaatcagcgcaggcggttacggcgataagcgtctgtcgccaaaagagagcgaagtattacgcctgttcgccgagggtttcctggtcaccgaaatcgccaagaagctcaaccgcagcattaagaccatcagcagccagaagaaatcggcgatgatgaaactgggcgtagagaatgatatcgcgctgctcaactatctctcttccgtcaccctgagtccgacagacaaagaataaatcgcttttatgttacccagcctgatggcgctacgcttatcaggcctaccagtcgactcatcttttacaggccggacaggcgacgccgccatccggcattttttatgcccgcgttttacgtacccgctcggcatacaccgccagcgtctgtttcaacacatccagcgtcacaggcttcgacaaacagctgtccataccggactccaggcaacgttgtttctcttccgccagcgcgttcgccgtcacgccgacgacaggcagcgtcagcccaagctgacggatacgctgcgtcaggcgatagccgtccatgttcggcatgttcacatcgctcagaacaatatcgatagcatttttactcagcacattcagagcgtctacgccatcattggctgtcttacactgataccccagcgatcccaattgatcggccagcaagcggcgattgatcggatgatcgtcaacgaccagaatcatcatgtcgtcatttgaatctgcagttttatccgtcgtcggcaatgcgctggaaagcgcttcactatccagctcaatactatagatacgcgccaacagcgcgggcaactcatgcaccgacgccacactatgcacccactcgcccggcgctctttccaacggaatcccgatatgacggcggcaaaagacgaccgccgccctcccctgccaggtatgctccagcgcgtcatcgacaatcaaaatatcgtccgcggcgggttcttgcccttcataacgctgcgtatgaacgccgctacgcgccagactggtctcaataaactggcacaaagaagtattgcgcaccgccagccaacagcaggttccggcgagtccttccacgctctttttcacagggtattgcgcgccataaagcgggatgcgcagcgtaaactggcttcccatgccaggctccgaatcgacggaaatatcgccgtccatcatgctgatcaatttttcgcaaatcgccagccccagaccggtcccctgaaagttacgctgtacgccggttcccacctggaagaagggatcgaacaggcgaaccacctcttttgccggaataccgacgccggtatcccgcacgcgaatgctgagataatccccatcacagcgcacatgcagcacgatgcagccaatatcggtaaacttaatggcgttgctcaacaggtttgaaataacctgctgtaaacgcatcgggtcgccgttcagcgataccggcacgtcaggctcaataaaacaatacagaccgagctgcttacgcaccaccaacggcagataattggcggtgatatggttcatcacctctcgcggtgaaaattcgcgcggctcaatctttagctgttccgactcaattttcgagaagtcgagaatgtcgctgataattttcagcaacagactggaggagttattcatcgccgtgaccagacgttccacgccttttggcagctctttggtttgcagcagatcgagattgccgatgataccgtacagcggtgtgcgcaattcatggctgaccgtcgcaaggaacatggatttagactggcttgcctgctccgccgcctgcgccatctcttgcagcgactcttccattttgacgcgcgtactcacatctaccaacacgcaaatcgcgacgttttcattgcgatagcgggaatggacgaagctaatttgcaaattggtattattgctggtcaatacatcaacaaagttgacctgctggccgcaaataatttgcgtcaggcgctgtctgtcttcatgcgtgagcatgttcaggtaggtgtgcgccagttcgttactcagaatattgacaccatcaatagtgcgcagaatacagatccccaccggcgcggaggcgacgattttacggttgaactgttcatgctcttccagacgctgagcatcgctctccgccggaataaaaattcgccgctcatacatccgcgcaagcgtaaacagccctgcgcccaccagcacgttcagcaggatagcgttcaggataagaatacgaatacgctccaggactaaatctacaggcacagaatagacaatactgagcgaggatggcggcaggctttttttgagtaccagttcgcgaaaacctggcgtataaccaaaccaggaacgctcctgcatccagcgcggctccgctttaataatgccgtcaggaccggtcaacgaaatcagcgaatggccgttctcatcaataatagtgacgcccatcggcaaactgccgggcgtgaaaaaattttccatacggatggactgctcgacgcccagcagcgcctgcagacggttggccagatacaccggcgtcagcgcataaaagtagcccacgccctgacgcgcgccctggcttatccagaaaaggttattcccactttcttcctgcggcgcgttgcggtatttcataatccgctcatgtaacgcttttaacgcatcatcgcgctccacgggcatttcacgcaggccgaaattcgccatacagaggttatcgctgccaatcaggaaaacgcggttaagatcatacgccgctgaaaagttgtcgcgccagtaacgcataaaccaggccagcgactccagcgatccgcgccaggcggagcccatcgccgcacagtctgagtcggcaaatagcggttcaaagtccggcaccaccattttgtcatcacgcgcacgcgacgacatgacgccgttttccgccgttaaacggttctcggcgatatatttgagctctttcatcacatccgacgtgcgctggataaaacgctgcgcctgatcggagctaaggttgaactcctgacgaatttcagactcccgctggtgcagggcattgacgatgtaaaacaccgaaacaaaggcgattaagagccaaatgagtaacgctaacgctctgaataagtagcgcgagactttcagcgtagttcgaaaggaagcaaggtatttcaaaggggcgaagctccgcctcaggatgtaaatagagtgtgactaaggtagcggtaaatgacgtagcccgcaacggcaaagaaaaagggccggatatccggccctcgcacagcaataacattactcgtcagcgtcatccgcaacgtcgtcatcgctttccgcttccggggcgatatcctcatccccttccgccacgctgccgtcgatagcgtcgagttcttcgtcatctaccggttcagcaacgcgttgcagacccaccacgttttcatcttccgccgtgcggataaggataacgccctgggtattacgtcccactacgctgatctcggacacacgggtacgcaccagagtaccggcatccgtgatcatcatgatctggtcgcaatcgtctacctgtaccgcaccgacaacggaaccgttgcgctcggtcactttgatagagataacgccctgcgtcgcacgagacttggtcgggtactcgtccgctgcggtacgcttcccgtagccgttttgcgttacggtcagaatagcgccttcgccgcgtgggatgatcagagagacgactttatcgtctcccgccagcttaataccgcgcacaccggtcgcggtacgccccatcgcacggacggcgtcttctttgaagcgcaccactttacccgcggccgagaacagcatgacttcgtcagaaccagaagtcaggtcaacgccaatcagctcgtcgccgtcgttgaggttcaccgcgataataccggcggaacgcggacggctgaattcggtcagcgccgttttcttcacggtaccgctggcggtcgccataaagacgttgacgccttcttcatactcacgaaccggcagaatcgcggtgatacgttcgttggcttccagcggcagcaggttgacgatcggacgaccgcgcgcgccgcggctggcttccggcagctgatagaccttcatccagtacagacggccccggctggagaagcagaggatggtgtcatgggtgttagccaccagcaggcggtcgataaagtcttcttctttaatacgcgcggcagatttacctttcccaccacgacgttgcgcttcgtaatctgtcagcggttgatatttgacgtaaccctggtgagacagcgtcacgacaacatcttcctggctaatcagatcttcgatattaatatcggcgctgttggcggtgatttcggtacgacgctcatcgccgaactgatcgcgaattaactccatctcttcgcggatcacttccatcaggcgatcggcgctgcccagaatgtgcagcaattcagcaatctgctccagcagctctttgtattcgtcgagcagtttttcatgctccaggccggtcagtttctgcaaacgcagatccagaatcgcctgcgcctgctgttcagtcaggtagtactgaccgtcacgcacgccaaattctggctccagccattccggacgcgcggcgtcatcaccagcgcgctccagcatcgcagcaacgttgcccagatcccacggacgcgaaatcagcgccgcttttgcttccgccggcgttggcgcgcggcgaatcagttcgataatcgggtcgatgttggccagcgcaatcgccagagcttcaaggatatgcgcacggtcacgggctttacgcagttcaaaaatagtccgacgcgtcaccacttcacggcggtggcgcacgaacgctgaaatgatatctttcaggttcatgatcttcggctggccgtgatgcagcgccaccatgttaataccgaaggaaacctgtagctgggtctgggagtagagattattaagcaccacctcgcccaccgcatcgcgtttcacttcaatcacgatgcgcatcccgtctttgtcggattcgtcacgcagcgcgctgatgccttccacgcgtttatctttcaccagctcggcgattttctcgatcaggcgcgctttgttcacctgatagggaatttcatggacgatgatggtttcacggcccgttttggcgtcagcttcaacttccgcgcgggcgcgaatgtacactttgccacgaccggtgcggtaggcttcttcgataccacgacgaccgttgatgatcgcggcggtcgggaagtccggccccggaatatgttccatcagcccttcaatgctgatgtcttcgttgtcgatatacgccaggcagccgttaatcacttccgtcaggttgtgcggcgggatattcgtcgccatacctactgcgataccggaagaaccgttcaccagcagattcggaattttggtcggcatgacgtccggaattttttccgtaccgtcatagttatccacgaaatccaccgtctctttttcgagatcggccatcagttcgtgggcgattttcgccagacggatctccgtataacgcattgccgccgcggagtcgccgtcaatagaaccgaagttaccctgaccatccaccagcatgtaacgcagcgagaatggctgcgccatacgaacgatggtgtcatacactgcggaatcgccgtggggatggtatttaccgattacgtcaccaacgacacgggcagattttttataggctttgttccagtcattgcccaatacgttcatggcgtaaagtacgcgacggtgtaccggcttcaggccatctcggacatccggcagcgcacggccaacaatgaccgacatcgcataatccagataggagctcttcagctcctcctcaatgttgaccggtgtaatttctctcgcaaggtcgctcatctaaccgctatccctctactgtatcccggattcaaaggtcgcaaattataacacattcgcccacgtactggtaaacggaatgcagccagacaatgctttattcgggtgccgcatgctctcttcatttataagcgtggtctcggcgtttattggcgatcggcttcagaggcgacacaggggagatcggggcctggccaggaagaggttagaaaatcaatacctcccgtgtatacccgtcatacttcaagtttcatgtgcgttggctgcgagttactcggcccatccctgggcctcgccccgtcgcggttagcgcaagcgctgttcaagacggttaaccattttatcctgcaactcgaattatttaggggatatgccgggaggcataaaccataatcagtatcaccagatgctatttaatcacataggccagatattctttcactacctcatcgtttaattcctgacccaatccgggctgttccggcgcgacataatagccattttccggttgataatcgtgggtacaaagttcccgaatagatgctttcatcgcattggtatgatgctcatgaataataaagttgggaattgctgtttccatatgcagcgcggctaccgtggaaacaggaccgccgcaaacatgcacctgtacagtggtgtcataaatattagcatagtcacagattttctttccttcggtaattccgccgcagagacacaaatcaggttgcgctacggcaatagactgcttctccagtaattccctgtatccccatcttgtgtaggaacgctcgccagtggcgattggaatcgttgttgaacgggaaactttctgcatattatcagaatttaatggatgaatcggttcttcataaagaaagatacgatacttttctatcgccttcgcaaattgaatagctgagtttgtaccgagaagagaatggatttccacgataatatcagcatcatcccccattgcttcacgcatagcggcaattcgcgcttcccccatttttaattgatcggccagtaacaatcctgaatagttacgatttctattctgaaaaacacagtcatcgccattacgatcgatttcgagtggatccactttaatcgcatcatatccatcgtcaagagccgcacgcgccgcctcagcatattcctcaggtgtcactaatatatggcgtttatccccccaaccaaattgtaactgactagcataggttcttaatttttcattagttttcccgccaaggagctgataaacaggtacacctaaatatttacctttgatatcccaaagagcaatatcaatagcgctcattccggcataaaaaacgttcccgccccccatcccccaaaaagtctttctgaaaaagaactcccaaattttttcgatatttagtggatcttcacccacaatcaatggcgccagatctctgatgatccctacgccagctttagcgcctgcgccataggccagtcctacttcgccaataccacttaatcctgagtcggtattcacccggataagtactggattataggaggacatcgtttgatctcttttttttaattcacagtcaaaaacttcaatagacgtaattttcataatttctccatttatcaggttcgtgatacaacatttgtttgttggcttttttcttttttcacatcaattttcattaacgccaaaacggctaccgcagcgaagcaaagtattgcctctacaataaatattcctgtcgcaccataatgagtagaaacgaatcccagtgatttattaatcaggaatccgccaagacttgaacatgagttaataaacgcaatgctgatagccaaccctgacggcgacaataatgcagaaggcagcgcccagtaaggtccgtaatagctgaggatcccaacaccatagaacgttagccccagcattctcagcgacattgaggggacaagagcaatcatcagaaaaccacagcctgccagaaacatgggtaatgcagcatgccattttcgttcattctttttatcggaatgccagccccaccagggcatgctgaacatagcgaaaataaacggaatactcatgattaaaccaacgtcagtatccgtaaaatcagctgaaaatcccttcaccaaccccggcaaccagtagtttgccgccagagcagccgcctgaatcaacatgtaggcgaaagaaagctgaagcaaaactggatttttgattacggaaagaaaggatgagttggtatttttatttaatgcagctgcggtttcattgtcagtacgtaatttattaactaaggccgatatctgctgtggcgtaagccatttagccttttctggactgtcaggcagtaaataaaatgtcaggatgccaaggaatacggtagggataccttcaatagcaaaaagccagcgccagccttcataatccggggtattcaaatgctcgatgatccaaccagacatcggtgcagccaataccgatgcaacagcaatagataacatgaagaaactattgacttttccgcgttcacgagccgggaaccagcatgcaagataataaaccatgcccgggaaaaagccagcttcaaatacccccaaaaaaatgcgagccagcaaaatatgttgagtatctttagcaaaaaaaatcagcccagttaccgctccccagccgataataatggaactaatccattttcttgcgccaagcttttgcaagccaatgctactcggaatttgaaagattaaatatgatatgaagaatatagaagaaatattagcgaaatcctcaggcgtaataccgagagattcattcatgcgtaatgcagcaaacccaatattgacacgatccatatagttaaaaaagtaaagaataaaggccaaaggaatgattttcctttttacaatacgaattgcatcgtataaattttcttgtggactactcattttgcatcaccttttatgattcaatgaataagggtattgaccggaatcgatgttacgtaaaaaacaatacaattcaaaagctaatgtgtcatatctgatatatcagcaagcaaacttaatgaaatatacaataacaacaataaagtatgtaaattttcttatatctgatatattagatccgttaattttgaataaattaattacaatggagccgggtttaaccatggaggagaagaaaatgaaaaatagattaaagcgtgactttagtcacatatcaattgaaatacccaaatccatcacccaggtgattaaagagaaaataagggagatgattatccatggcgatttcgatcttgggcaagcgatcagtgaaaatgaactatcaaatattctgatggtaagtaaaacaccaattcgtgaagcttttatttggctgagctataatgaaaacttagtcaacatcattccccgcagtgggacatttgttttttctgtcaccgacgaggatatcaatgatctcatcaaaatgagggttatccttgaacagggcgcaattcgtgaagcgatggagaaaaatgctaacaatgtcatagtcgaattaagcaatattttatcgaagtcagcaaaaattaatgcagagcgagatacgcaagcttacctcaaactggatcatgattttcattatgtttttgtgaaatatgccgataataaatacatttcacaagcacacctgttgatctcagcacgtttattggcaattcgctacagactggattttaccgctgaatatatcaccagctctaaccgtggacatgccactattttggatatgttaaaaaacaacaacgtcgagggcgtctgtaattttatcacgcaccacatcggtagcggttttacagaacgcgcaagaaaacttcttgcgctgaaagcgtaataaagacggcagtagatataacgcagcgactttgcacctgctatactgccccgatagatcaatagcggaatctcatgtactcatgaacactgaaaaaccgtcggtagctcacaacgttgaccataatgaaatcgccaaattcgaagccgtcgcgtcgcgctggtgggatctggagggcgaattcaagccattgcatcgtatcaaccccctacgccttggctacattactgagcgctcaggcggcctgtttggtaaaaaggtgctcgacgtcggctgcggcggcggtattctggcggagagcatggcgcgcgaaggcgcaaccgtcaccgggctggatatgggctttgagcctttgcaggtcgccaaactgcatgcgctggaaagcggcatcgaggtagagtacgtgcaggagacggttgaggaacatgcggcaaaacacgcccagcaatacgacgtcgtcacctgtatggaaatgctggagcacgttcccgatccgcaatcggtcgtccacgcctgcgcccaactggttaaacccggcggcgaggtgttcttctcaacgttgaaccgcaatgggaaatcctggctgatggcggtcgtcggcgctgagtatattctgcgcatggtgccaaaaggcacgcacgacgtgaagaaattcattaagcctgctgaactgttaagctgggtagatgaaaccgtcctgaaagagcaacatatcaccgggctgcactacaacccgataaccaatactttcaaactcggtcccggagtagacgttaactacatgttgcatacccgcgctaaaaaagcctgacatcaaagaattttcctataagggttgcgttagatcatcgggcgcaacctttctcttcgatgaagaaatcagcattcgatcaaattttgatttttttttatgaattgttgacatcctctccaggccttatcagacgcgcatttagcgattcttacgcttttgcaaccgcaatttaacgccaaaatcaactcttgtactcaaaagaatccctactagaatactcaccatatagcgtttcacttatcgattaccccctatatatagtatttatccacagagttagtcacaacgtggcgttgtggataagcggggggatatttttctttcacggacaggtaaacaggtagaaaaccacatgaatcagagtctgctggtgacaaagcgtgacggccgtactgagcgcatcaatctcgacaaaattcatcgcgtgcttgattgggcggcagaaggactgaataacgtatcggtttctcaggtcgagctacgctcgcatattcagttttatgatgggattaagacctccgatatccatgaaactattattaaggctgccgcagacctgatctctcgcgatgcgccggattatcaatacctggctgcgcgtctggcgattttccacctgcgtaagaaagccttcggccagtttgagccgcccgcactttaccaccatgtggtaaaaatggttgagcttggcaaatacgacaatcatctgctggaagactacacggaagaagagttcaagcagatggattcgtttatcgttcacgatcgcgatatgaccttctcctacgctgccgttaagcagctggaagggaaatatctggtgcaaaaccgcgtgaccggcgaaatctatgaaagcgcacagttcctctacattctggtagcggcctgcctgttctcgaactacccgcgtgaaacgcgtcttgactatgtaaaacgtttttacgatgcggtctctacgttcaaaatttcgctgccgacgcccatcatgtccggtgtgcgtaccccaacccgtcagttcagctcctgcgtactgatcgagtgtggcgacagtctggattccatcaacgccacctccagcgcgattgtgaaatacgtttctcagcgcgccggtatcggtatcaacgctggccgcattcgtgcgctgggcagcccgattcgtggcggcgaagccttccacaccggctgcatcccgttctacaagcacttccagacggcggtgaaatcctgttcgcagggcggcgtgcgcggcggcgcggcaaccctcttctacccgatgtggcatctggaagtggaaagcctgctggtgctgaaaaacaaccgcggcgtggaaggcaaccgcgtacgtcacatggactacggcgtacagatcaacaaactgatgtatacccgcctgctgaagggcggcgacattacgctgttcagtccgtcggatgtacccgggctatacgatgcgttcttcgccgaccaggacgaattcgaacgcctgtacgtgaaatatgaacacgacgacagcatccgcaaacagcgtgtgaaagcggtcgaactgttctcgctgatgatgcaggaacgcgcctctaccggtcgtatctatatccagaacgttgaccactgcaatactcacagtccgttcgatccggttgtcgccccggtacgccagtctaacctgtgtctggagattgccctgccgaccaaaccgctgaacgatgtcaacgatgaaaacggcgaaattgcgttgtgtacgctgtctgcattcaacttgggtgccattaaaactctggacgagctggaagaactggctattctggcagtacgcgctttggatgctctgctcgattatcaggattacccgattccggctgccaaacgcggcgcaatgggccgtcgtacgctgggcattggcgtgattaacttcgcctactggctggcgaaaaacggtaagcgttattccgacggcagcgccaataatctgacgcataaaaccttcgaagccattcagtactatctgcttaaagcgtccaacgaactggcgaaagagcaaggcgcctgcccatggttcaacgaaaccacctatgcaaaaggcattttgccgatcgacacctacaaaaaagatctggatgcgattgtcaacgaaccgctgcactacgactgggaacagctgcgtgagtcgatcaaaacccacggtctgcgtaactccacgctatcggcgctaatgccgtcggaaacgtcgtcccagatctccaacgccaccaacggcattgagccgccgcgcggctacgtcagcatcaaggcctcgaaagacggtattttgcgtcaggtcgtgccggattatgagcatctgaaagacgcttacgaactgttgtgggagatgccgaacaacgacggttatctgcaactggtgggtatcatgcagaagtttatcgatcagtcgatttccgccaataccaactacgatccgtcacgtttcccgtcaggaaaagtgccgatgcagcaactgctgaaagatttgctcaccgcgtataagtttggcgtgaaaactctgtactatcaaaatacccgcgacggcgcggaagatgcgcaggacgatttggcgccttctattcaggacgatggctgcgaaagcggcgcttgtaagatctgatgaatagtgccgggtagcgctatgcttacccggcctacgattgtacggtttgtaggccggataaggcgcttgcgccgccatccggcgctcatcccataaaggattcacttcaatggcatacaccactttttcacagacgaaaaacgatcagctcaaggaacccatgttctttggccagccggtcaacgttgcacgctatgaccagcagaaatatgacatcttcgaaaaactgatcgaaaaacagctctctttcttctggcgtccggaagaggtcgacgtctcccgcgatcgtatcgattatcaggcgttgccggagcacgaaaaacatatcttcatcagcaacctcaaataccagacgctgctggattccattcagggacgtagcccgaacgtcgccctgctgccgctcatttccatcccggagctggagacgtgggtagagacctgggcgttttctgagacgattcactcacgatcctacacccacattattcgtaacatcgtcaacgatccggctgtcgtttttgacgatatcgtgaccaatgagcaaattcagaagcgcgccgaaggtatctccgcctactacgacgaacttattgagatgaccagttactggcacctgctcggtgaaggcacccataccgttaatggcaaaacggttgtcgtgaatctgcgtgagctgaagaaaaaactgtatctgtgcctgatgagcgtgaacgcgctggaagccatccgcttctacgtcagcttcgcctgctctttcgcatttgccgagcgtgaactgatggaaggcaacgccaaaattatccgtctgatcgcccgtgacgaagctctgcatctgaccggcacgcaacatatgctgaacctgttgcgtagcggcgtggacgacccggagatggcggaaatcgccgaagagtgtaaacaggaatgttatgacctgttcgtgcaggcggcgcagcaggaaaaagagtgggcagactatctgttccgcgacggttcgatgatcggcctgaataaagatatcctgtgtcaatacgttgaatatattactaatattcgtatgcaggcggtggggctggatctaccgttccagacccgctccaacccaatcccgtggatcaatacctggctggtgtccgataacgttcaggtcgctccacaggaagtagaagttagctcttatctggtcggacaaatcgattcggaagtcgataccgacgatctgagtaatttccagctctgatgggacgcgtcacgctgcgtatcactggcacacagctgctgtgccaggatgaacacccttctctgctggccgcgctggaatcgcataacgttgaggtggagtatcagtgccgcgaaggttattgcggctcctgtcgtacccggctggttgccggtcaggttgactggattacggaacctttagcgtttatccagccgggagagattttgccctgctgctgcagggcaaaaggcgatatcgaaatcgagatgtaactcagtgcaactcgctggtggaaaccaacggcatcacgccacgttttttcatctgcacggcatacagtgcgccagcgagtaccaccaacaccgcgccagcgacataaatcatacgatagccaactgactcaaccatcattcccatgataaaggcgccaatcgccattccggcgtccatcgcgttaaagaacagtgaattcgccacaccgattttatgcggttcaaccgagctgataatttgcgtctggaagaccggcgtgaccgaaccgtagccgataccgatgagaccaccggaaataatcatcatgatgctgccattggtgtagcccagcgccaccagaccgatggtaaaagccaacagacatggataaacaacatatttcggcccttttttatcacaaatattcccggtgaaggtacggcatatcatcagtaaaatcgcgtagcacagcaggaaattactggccgccgccattaaatccagctcacgcgcatacagcgccaggaaagccgacacgccggcataggagaaagtcataaaaaaggtgaccagcgcaaaaggcaaggcggcgcggtcaaacatcgcggaaaaacccagattcggtttcgaaccatcggcatgacgaattaccggaggaaccgtcacaatcagggaaagcacaatccctaacgccgctacagcggaacaaagccagaatgcggcagtgaacgcgtcccagcgggccatattcaaaccgatccacggtcctacgaccatcgccaggcccatcgctaaagagaaaaagctgatgccctctccacgtcgggaggccggaattaaccgcgctgaaatagttccttttaccgtggtaataacaccaaacgtaatcccatgaagtacgcggataaagagcagcgactcgatagaatggcaaaccggatacagcgcggtaatcaccaaaaaagccagagaagagagcaccagaatctttttattcgaatattttcccacccattgtccggcaaatggccgaataacaattgccgcggccaggaaacatgtcactaacagcccggccttatctgcagaagcatgcaggcggtcagcgatataaatgggtaataaagttagcagtacataaaaaacaaaaaagataataaaactgactatggtgattgcccaaaaatctttcgtccataatttttctttcattcttaacgacccgctcagatggcgcacgcaggcaacgctcagctcaactgaacacctatcaggtgcgtcaaaatgtgatgtattcgatagaatcacagtataaacaagtgcactctattagaaaaattaatcgttttaattatattgattaggttttactaatgacactaacccaaatccacgccctgcttgccgtactggagtacggcggatttaccgaggccagcaaacggctatacatgacgcaatccgccgtcagccaggccatctccgcgcttgaggaggagctcggcgttgacatattgattcgtgagcgtcgtaaagagatcgagcttaccgccgccggtagccgcatcgtcaggcacttacgcgcgatccagcgcgacgtcaacgcggtaaaagagattgccgaacaagaaaaaaagaacccggcccgtacgctacggattggctgttttcccagcgcctgcgcctgcattttacccggcgtcattcgctattttgaaagccatcatccaaatgtaaaaattatcccttatgaagagaacagtacggctattattgattcgctgcaggacggaagtattgatgccggtttcgttccttttccggtcaacggtatgtattgcgtccccatttaccgggataaattcaccgtagtggtgcctgaaaatcatcccctggcggccaatagtacggtaacggtcgaagaactgatggacgaaccacttattgtcagtaaaggtcgttatgaattaagcattatggcgttgtttaaagaaaagggtattgagccgatatttaaatatgaatttaaccatcccgatactgcgctgaattttattcgccagggattaggtatcgccttattgccagaattaaccttaaaagccacgacaggaaaattatgctccgtggcgctggaacccaccttttatcgacaaatttccctgttagcaaaagaaccgccggtagaaggaagtccgctatttttattacaaaaatgtatggaaacactgaccgatgaggggttgctataaaacaaccccgcctgatggcattgcgtttaccagacttacgctggcaaacgttgcgccaggccggatgaggcgtttatgccctcatccggcgcgtcacttcgactatggcaaacctttagtcatttttttgcaggaacatgaccgccttatccgggaagtcagtgaacagcccgtcgacgcccgccttgttatacaggatgtcgtacaactgattgacgtctgtggcatagtccggcaattgatcggcacgcacagtgtaaggatgcactaccatcttattctgatgcgcgtcttgcaccattccagtcagcttgatattccctttcgttgagccttccgcaaccagcatatggtaatccggaccaataccgtccgcatattccgccacctgcttcatagcgcccggcttaaacatccagtcgtagttgtaatttacccaacgaccgtccggctgtttctgctgtgtttcattccagtcggtatacgcaataagttgaaccagattgagatccatccccattttgggttccagttcattcttaatacgtttcagctcagcgacatcaaaacactgcaaatagacattgtcctgcttgccggtgtaaccatacttcttcagcacttccagcgttttcgcggcaatatctttcccttcctgatgatggaaccacggcgctttaatttccggataaataccgatatttttaccggtagagtgatttaatccctgaacgaattcaatttcctcttcaaaggtatgaatgcggaaatcagattttcccatcgggaaacggcccggataagtttgtacttttttgccgttttcaatatcaaacccttcggtaaacttcagggatttaatttcatccagcgtaaaatcgatagcgtaatagcgcccatctttacgcgcccggtccggaaaacggtcagcgacgtcagtcacccggtcaaggtagtggtcatggaggacgaccagatggtcgtcctttgtcatcactaaatcctgttccagataatctgccccttgcgcatacgccatcgctttcgccggtagcgtatgctccggcagataaccgctggcaccacggtgggcgataacgactttttcagccgccacggcgccgcttccgatggtcattcctgccaacattaacgccacgctaaggtttttcagtgtggttttcatgttattagcctccgttgcgttttaactgcagctcatcatgatggcgtttttcaccaatcatcacgaccaccagcaggattaccgccagaatgctgccgccaatcatcaccataaagccgccatcccaaccgaagaagtcaacggtataacccacaatggcgcttgcagcgacagaaccgcccaggtaaccaaacagaccggtaaagcccgccgccgtacccgccgcttttttcggcgccagttccagcgcgtgcagaccgatcaacattaccgggccgtagatcaggaagccgatgataatcatacaagccatatcaacgttcgggttccctgctgggttcatccagtaaacgatggtcgcgatagtcaccagggtcataaagaacacgccggtcgcgccacggttgccgcggaagactttatccgacatccagccacacagcagcgtgcccggaatacccgcgtattcatacaggaagtaggcccaggaggatttatccagtgcgaaatgcttcacttctttcaggtaggtcggcgaccagtcgagaataccgtagcgcagcagataaacaaacacgttggcgatagcgatgtaccacaacagtttgtttggcagtacgtactgcatgaagatctgcttcgcagtcagctcttcttccgctttttcgttgtagtcgtccggatagtcgtttttatactcttcgataggcggcagaccgcaggattgcggcgtatcgcgcatcattgcgaaagcgaacagcgccaccacaatcgcgccaaaggctggcatatagagcgccgctttccagtcgttaaaccaagccatccccagcaggaacagcagtggcgggatcccgccgccgacgttatgcgcgcagttccagaccgacacaatgccgccgcgctctttctgcgaccaccagtgaaccatcgtacgaccgcacggcggccaccccatcccctggaaccagccgcaaaggaacaacagtacaaacatcacggcgatgctggatgtcgcccacggcacaaagcccataaacaacatgactgctgcggccagaatcaaccctgccggcagaaaaacgcgcggattcgagcgatcggacaccgaacccattataaatttcgaaaaaccataagcgatggaaatcccggacagcgcaaagcccagatcgccgcgtgaaaaaccctgttctaccaggtagggcatcgcgagggcaaagttcttgcgcaccagataatacgcggcatagccaaagaatatccccaggaaaatctgccagcgtaatcggcgataggtcggatcaatctccgccgctggcaagcgcgctttatgcggcgctggtttaaaaatactcaacatattgtagcctccgtggcccatattttatttagaggtaaacaccgcagttcgttcaaacaaccccgctgctcccagtgtggccgcgatgttaagtaaagatacgtcacgttaatgtgaattacagcacatattgttacagatttatgactaatgttcagaaaggcgcacgaaatcacgtttcattttcgaatagtgagcgattatgcgcgaaatcaaacattacatatgatttgtatggctaaatgataaaaaacgaactgtgaggaaaaacaatgaaaactcgcgactcgcaaacaagtgacgtgattatcattggcggtggagcaacaggcgcagggatcgcccgcgactgcgcgctgcgcggtttacgtgtcattctggtggagcggcatgatatagcgaccggcgcgaccgggcgtaaccacgggctgctgcacagcggcgctcgttatgcggttaccgacgcggaatccgcgcgcgagtgcattagtgaaaaccagattttaaaacggatcgcccgccattgcgtcgaaccgacggatggtctgtttattacgttgccggaagatgatcttgcgtttcaggccacctttattcgcgcctgtgaagcggcaggcattcgcgctgaagccatcgatccgcagcaggctcgcatcatcgaaccttccgttaaccctgcgctcatcggtgcggtaaaagtgccggatggcaccgtggaccctttccgccttaccgccgccaatatgttggatgccagagaacatggcgcaatcgtgttaacggcgcatgaagtgaccgggctcattcgtgaaggcgcaacggtctgcggcgtccatgtgcgcaaccatctcactggcgaaactcagacgcttcacgcgccggtggtggtcaatgcggcaggtatctgggggcaacagatcgccgaatacgccgacctgagtattcgcatgttcccggcgaaaggctcgctgttgatcatggaccatcggatcaaccagcatgtcattaaccgctgccggaaaccatcggatgccgacattctggtacctggcgatacgatttcactgatcggcaccacctctacccatattgattacaatgagatagacagcaaccgcgtcaccgcagatgaagtcgatatcctgctgcgtgaaggggaaaaactggcccctgtcatggcgaagacgcgtattctgcgcgcgtattccggcgtccgcccgctggtggccagcgatgacgatcccagcggtcgtaacgtcagccgcggtattgtgttgttcgaccacgccgaacgcgacgggcttgatggcttcattaccattaccggcgggaagctaatgacttaccgcctgatggcggaatgggcgaccgatgccgtgtgccgcaagttgggcaatactcgcccctgcatcacggcggatacgccgttgcctggctcaaaagagtctacggaacatacgctgaaacgcattatctcgcttcccgcgccgctacgcggatcggcggtttatcggcatggcgatcgcacgccggggtggctgagtgaaggccgccaacaccgtagcctggtctgtgaatgcgaggccgtcacggcgggggaagtgcagtatgccgtcgaaaacttaaccgtgaatagcctgctggatctgcgccgtcgcacccgcgtagggatgggcacttgccagggcgaactgtgcgcctgccgcgcggccgggctattgcagcgttttaatgtgacgaccgcggcgcaatctattacgcaactctctgaatttctgaatgagcgctggaaaggcgtacaacctgtcgcctggggagacgcgctgcgcgaaagcgaattcacgcgctgggtttatcagggattatgcggtctggagaaggagcaccaggatgaaatttgatacggttattatgggcggcggtctcgccggtttgctatgcggactgcaactccagcagcatggattacgctgcgccatcgtcacccgcggacaaagcgcgctgcatttttcctccggctcgctggatctactcagcgccctgcccgacggccaaccggtgactgacattaccgccgggcttgatgcgctgtgccgccaggcgcctgaacatccttattcgcgtttaggcgcgcaaaaagtccttacgctggcgcaacaggcgcaaacgctacttaacgccagcggcgcgcagttatacggtgacgtacagcaggcgcaccagcgtgtcacgccgcttggcacattgcgttcaacctggcttagctcgccggaagtaccggtctggcccttatccgcacagcgaatttgcgtcgtcggcgttagcggattactggatttccaggcgcaccttgcggcagcgtcgctgcgccaacgcgacctcaacgtggaaactgcagaaatcgaccttccggaactggacgtactgcgtgataacccgacggaatttcgcgcggtcaatattgcgcgtctgcttgataacgaagaaaaatggccactgctgtacgacgcgctgtcgccaatagcgacaaactgcgacatgatcatcatgcccgcctgtttcgggctggcgaacgatacgctgtggcgctggcttaacgaacgtctgccctgcgcgctcacgctgctgccgacgctgccgccatcggtgctcggtattcgtctgcacaatcagctccagcgccagtttgtccgtcagggcggcatctggatgccgggcgatgaagtgaagaaagtcacctgccgtcgcggtaccgtgagcgaaatatggacccgcaaccatgccgatatcccactgcgcccgcgttttgccgtacttgccagcggtagcttctttagtagcggtctggttgccgagcgcgaagggatccgcgaacctattttagggctcgacgtacagcaaacggccacccgcgccgaatggtatcaacaacatttcttcgacccacagccctggcagcagtttggcgtcgtgacggatgacgctttccgcccctcccttgcgggcaacacggtagaaaatctgtatgcaataggttctgtgctggcgggattcgatcctatagctgagggatgcggcggcggcgtctgcgcagtcagcgccctccaggccgcgcaccatatcgctgagcgtgcaggagaacagcaatgagcgacacacgttttgaaagttgtataaaatgtacggtgtgcaccaccgcgtgcccggtcagccgcgttaatcctggctaccctggccctaaacaggccggaccggatggcgaacgcctgcgtctgaaagacggcgcgctgtatgatgaggcgctgaaatattgcattaactgcaaacggtgtgaggtcgcctgtccgtcggacgtgaagattggcgatatcatccagcgcgcccgcgcgaaatacgatacgacgcgcccgtcattgcgtaactttattctcagccataccgatctgatgggcagcgtttcaacgccgttcgcgccggtggtcaataccgccaccgcattaaagccagtgcgccagttgcttgattacgcgctcaaaatcgatcatcgccgcaccttaccaaaatactctttcggcaccttccgccgctggtatcgtagcgtggcggcgcagcaggctaaatacaaagatcaggtcgcctttttccatggctgttttgtgaattacaaccatccgcagctcggaaaagatctgattaaggtgctgaacgcaatgggtactggcgtacagttactgagtaaagagaagtgttgcggcgtaccgctgatcgctaacggttttacggataaagctcgcaaacaggctatcagcaatgtggagtcgctacgcgaggcgattgccgtcaaaggtattccggtcatcgccacgtcatccacctgtacgtttgcgttgcgcgatgaatatcctgaagtgctggacgtggacaacgccgggctgcgcgaacatatcgagctggccacccgctggctatggcgcaaactggatgcagggaaaacgctgccgcttaatcctttgccgctgaaagtggtctaccatacgccgtgtcatatggaaaaaatgggctggacgctttacacgcttgaactgttgcggcaaattccggggcttgaattgacggtacttgattcacagtgctgcggcattgccggtacgtatggatttaaaaaggaaaactatccgacatcacagtccatcggcgcgccgctgttccgccagattgaagagagcggcgccgacattgtcgtcaccgattgtgaaacctgtaagtggcaaattgagatgtctacaagcaaacgctgcgaacaccccattacgctactggcccaggcgctcggctaagtaaaaagcgccggagcccctccggcgccattaccctactcaccagggacgattttccatcagacatatacccttcatacttcaagttgcttatgtgttggctacggattattttgggtataaacgcggatgtctctttgcaataacctgccctatttggttaaccatgaccgctaacccacggtggcatgacagataacgacgttactgtttatagagcaatatctcttgtatcgacgcgttaccagccacctttaaagagggggataactgaatatccccaataataattgagtgttatgtgaataataagaaaatcaggtctatgcctgatttaatatatcccccgctaataataatatttttacaaataattatacattacatcatattcgctactttcacttaccaggaaacagagcaaaatgaatatatgtgtaaattcactttaccgattgagcataccgcaatttcacagcttatatacagaagaggtgagcgatgaggcgcttacattgttgtttagcgccgtagagaacggtgatcagaattgtattgatctgttatgcaatcttgcgttacgcaacgatgacctggggcatagagttgagaaatttctttttgatctctttagcgggaaaagaacgggatcatcagatatagacaaaaaaatcaatcaggcttgccttgtattacatcaaatcgccaataacgatataacaaaagataatactgagtggaaaaagctacatgccccttccagattactttatatggcaggttccgcgacaaccgacctttctaaaaaaataggaatagcacataaaattatgggcgaccagttcgctcagacagatcaagaacaggtaggagttgaaaatctttggtgtggtgcgcgaatgttgtcgtcagatgagctagcagctgcaacgcaaggtctggttcaagaatcacctcttctctcggtaaactatcctattgggctgattcatcctaccaccaaagaaaatatattaagcactcagctacttgaaaagattgctcaatcaggattatctcacaatgaagtcttcctggtaaatacaggagatcactggcttctctgtttattttataaacttgcagaaaaaataaaatgccttatatttaatacttattatgatttaaatgaaaatactaagcaagagattatagaagcagcaaaaattgcaggcatatcagaaagcgatgaggttaattttattgaaatgaatttacagaacaatgtacccaacggctgtggtctattttgttaccatacaattcaactcttatcgaatgccggacaaaacgatcctgctaccacactacgagaatttgcggaaaatttcttaacgctttcagtagaggaacaagcactatttaacacccaaacccggcggcaaatatatgaatacagtctccagtaatggtgagtacttagagcctatcccattaggctcttatcctgaaatgatgctctgcgaagaatttataagtatataagggtgggaaggccaggccttcccactaaaagttctatgccgtcaatgattcaaccacgtctatccagccatgctcgctggtaatgtcctcgccattaagccaacggcgcagcatatttagcgccatcaccgcacaaacctcctgacgtattgccagactataccgataggcgctaaaacgcatgcgtaaggcatacgtgccatccggcatttttctcaataactacgttttgccgtgcttactgactgaacagatttaaacatcgccaacctgctgtccagcgcctcggtgtagagcatcgtatctaccccgaccgcgacaaaattcgcgccccacgccagacatttctgcgccattgccggatcgaccgccaaaaaacccgccgcttttccggcggcgcgaatacgataaatacacgcttcaatgattcgctgcacttccgggtgtccggcattatcggggtaacccaatgaagcagagagatctgccggaccgataaagacgccatcaatgccttcaacctccagaatcgcgtcaaggttttccagcgccactttgctttcaacctgcaccaacaggcagagcgactcattggcctgtgccatatagttgtcgattctcccccagcgcgccgcacgcgccacgctcgcgccaacgcctcgttgccccaacggcgggtatcgggtagcggaaacgacctggcgcgcctgttctgcggtgtcaaccatcgggatcagtagcgtttgcgccccgatgtccagtacctgtttaatgagcgctttacttccctcgatcgggcgaatcaccggctggctggcgtatggggcgatggcctgtaactgatgatacaagtcctgcaccgtattaggcgcgtgctcgccatctattaacaaccagtcataacccgacgtcgccgcaatctccgccatataagaggtggttgaactgagccacaaaccaatttgcgtatcccctttacgtaatccttctttaaaaggatttgataacaatgcgttcatagcgatccttacaacgtagataagattaatgatgcgcagcgccggattgcgccaccggacgattaacgctcagcgtgaagataattaatgagccaatgatggcgactccggccagcgtcagcaggcccgccgcatcgctggcaaacaacgtttccgcttttacgcgcagaattggggcaataaaaccgcccacagcgccaaacagattaacgaaaccaattcctgccgccagagccgtaccggaaagtagctgcgttggcatggtccagaatacgggctgaacggcaataaatcctactgctgcaacacagagcgccagaatagcgagcaccggagaaaccagacctgacaggccaatgccaatgcccgcagccagtagcgtcactgccgcaacgttacggcgatcgccggtacggtcggagtagcgaggaataagccatgtgccaagcaaagccgccacccagggaaccgctgttaccaccgaagcggtaaagcccactttagtgcccaatagcgcggcaacctgggtcggcaggaaaaagatgagtccgtataccgccacctgaatcgtcagataaataatagccagttgccagacgcgtccattacgcagcgcatccgcaagccttgacgtgacctttttctcttcttcgctcgccagttgcctgataagcgcgttcttttcttccaggctaagaaaacgcgcctgctgcggagtgtcatcaagccagaaaaaggtgaatatccctgcgccaatcgccagtaggccttcgataacgaacatccagaaccatcccgggtgccccataaaaccatgcatctccagcagagcgccggagagcggcgaacccaacgttaacgccagcggcgcccccatataaaatagccccataatgctggcacggttacgctgcgggaaccattgtgaagttagatagatcatgccggggaaaaatccagcctccgccgcgcccaatagcgtgcggattatcagaaattttgcttcactatccgcccaggccatcgcagcagagagaaagccccacagcagggtagtcgtgccgatccaggttcttgcgccaaatttgcgcatcagcaggttagccggtacgccaaggaaagcgtaaaccacaaagaaaataccggcccctagcgcgtaggcttcattacttagcccggtatctatctgataggtctctttggcaaaaccaatatttgaacgatccagaaacgccagtacatacagcgccaacataaaaggaattaaacgtgcgcggtttttcttcactacgccgtcaagtaaagtgatgctcatagcaatatcctcaacaggatgagggcgttgccgtacaaaggcaacgcacgagttattagtggctataagggcgtttcaagtgacagtcacggttaagctcgacgccgaagcccggcttatccagcactgatttatggatgcgtccattcaccggcaccggctcatccaggagaatcgggtcaaattgcggacgcagagtggagcagtccgggctggtcatcaggaactcgctgaaaggggtattagtgaaagtaataactgcatggtgcgaatagacagacgaaccgtgcggcaccaccagttgcccgcgcgatttggcaagcgcggcgatctcaaccagcgtggttaatccgccgcaccagccaacatccggctgcataatatcaatgccggtttctgccagagtgcggaaggattgcagcgtaccatggtgttcgccgctggtaaccatcatccctgcaggcgcgttgcgttttaattcgcgatagccttcatactgctgcggcggcagacactcttcaatccatttgagattaaatggcgcacaggcgtgagccagtttagtcgcatagttcacatcctgactcatccagcagtcgagcatcagccagaaatccggcccgcacttttcacgcatatccgccaccatcgcggcatctttacggatccccgcatcaccatcgtgcggtccccagtgagtcggcattttaccgccgataaagcccatttctttagccagatccgggcgtgcgccggtggcgtaaaactgaatttcatcgcgcaccgctccgcccagcaatttataaaccggcagcccaaccaccttgccaaacaaatcccacaacgccagatccacacaggaaatcgtgttcatcaccagaccgccggaaccggagtagtacatggtcgcgccgagcatctgatcgtgaataagtttgatatcgcttacgcatttgccttcaataaaccggttaagatgtttttctacgataaaacagcccatctcccctgctgtcgaaacggcgaaccccgtctgcctattttccgcctctacttcgacaatcagcgtccctaacacgttgatcccaaaagactgacgagactgctcatagtcgcgatatttgctcatgggagtggcgatatggtcatcaatccagtgatttcctccctggtcgtgataatccccgccgccagcccctttctctgcggtagcgcccccaataaaccaggctcgaacgtgtttaattttaggaagagtcataatattctccattttaagatgcgagtgagtcgaagggacttttccatcccaacaggcgtgaaatatctttggcacaggcaatagctttaccggccaaataatctagattctcttcgttgatttgcaggcgcgtgccgaccactgaaattgccgcggtcagttcgtttctggcattaaataccggtgcggcaacgcagcggacatccggataatcctccccgttatcaaagctccatcctcgctggcgaatgcgctccagctcatcattcaattgttgcggctcggtgatggtggtcagcgtggctcgctcccataccagttgttcaataatggctttgcgtacggcggccggctgccatgccagcaggcatttgccgatgccggaacgataaagagagaggcttttcccctcatgcgagcgcacgctgatagtggatgaggattccactttcagtatgtaatacgcattttcgtggtcgatgatccccaagtgacacagcagcccggtttcatccatcagttgtgttagacgaggacgcgccagctcccgcagatccatcttgctgagcgcatgacccgacaattcaacgagcttagtccacaggcagtagttatcctgatgatcgaggctaataaatcgctgacgttttaattcattcaacagcaggtacgcggtgctttttggaatacgcagcgtttcaataatgattgccgcgctgcatgggccaatacgcgcgatcaaattgaggatgtcgattgcgcgagtaagagccgggactttacttgattccaacatattggactccagtctgagacactggaatcagtgtgaaaggtcagtagggaaaaaattgtgaagcgcgtcaaagcttatccgccttccaacggagtggaagggttaaccatataaatgtgaattaacgcacgtattactttgtattcagtacaattggctggacaaaaaagcagatgatattgccggataatggcatagcggccttatccggctcacgatgtcgttcccatcgcagataagagaaagggattatgatgtcaatgattcaaccacgtctatccagccatgctcgctggtaatgtcctcgccattaagccagcggcgcagcatatttagcgccatcatcgcgcagacctcctgacgtattgccaggctataccgattggcgctaaaacgcacgcgtaaggcatacgtgccatccggcgtcgccagcgcgaaattaagatgttcgttttccagccccgacacggccagcgccagaccggcataatgattgctgcgccgttctgtcgtccagtgtgccgtttgcgccagcgtctcttcctgagaaggaacgacttcgctggcaagaacaggcgccccggcgcgggaaagctgtagcgccagtaagccgctggtgtattgctcgctcaacgtcagactcaactgcctttcctgcaggcggcgggctatttgcgccggcaggttttccgtaccttcaaaaatcaggttctgcccggcaacccgtttgacctctggccataacgccagcatcgcctcccgttgcgtcgccgggccggtcaatttcagttcaatgatcggcattgatgagcgataccccatcgtcacgccgggcggcaacggcagtgaatcgagacgctgcgcgaggtcactttctgaacgtccaaaagtcgttaaccgcaggcaaagcggcggctccggcagcgaaaaacgcgcgcgtaaccgcggtaagatttccttctccaccataaccttaaattcagacggtacgccgggggtgaaaaacatcaggcagcggttgagctgtagcgcaaatccacaggcagtgccgagcggattattaataaactccgcgctggcaggcagttccgcctgtttacggttgctcggcgccatcacgcggccacgctgctgaaagtagcgttccatttcggtcagccacgcctggtgcagtactaatccttcgccttttgccgttgccgcggcgagcgcgcttaaatcatcgctggtcggccctaacccgccattaacaatcaaaacatcagcatgttgactgcgttcacgcaagatagcgaccagactgtccagattatcgcctaccgtatttcgccgtgataacggaacgccctgatgaaagaaaaaatcagccagccaggcggcattggtgtcaacgatttgtccgtgcaacacctcatccccggtggatagcatttccacatttagcattgtgttctcctgctcttatgatgaaaacactataacgcaaagacgaatatgacgtggaaagaagaatgacgggaacaggaggaatatggcgcgacgattgccgcgccgttagcatcaaaagctggcgtttacgccaacataagggccgtcagcaatcgcattatcgcggttgccgtctttacccgccaggttcaggtaacgataaccggcttcaatgctcagcgggcgcataatggtgaaacgcgcgcctgcattcgcttcttcataactgtcgataccgctggacagcgaatctggtgaataataatactcgccgaacagacggaagctgttgccgattttccattgtagcccaccgccgacagccgccgcatagccttcatcgctgtctttcggattggtataaatacctttaccgccgaccgtcgccagcagcggtcccaccggaatgttcagccccagacccacgcccgcagcatcgccatcatcatcgttgtgcatccagttgccgcttagcgccagtcccgtcgattccgtaccaaaacccacgccaatgttggtgtaatcttcgcccgcctggccgctaatactgatggcctgcgccgatgcagaaacgaacagcattccggcaaaacctaataatatgctttttttcatttttaccctttccagcaagcacataaagaaaaactccccaaaacggcagaattgtactgccagacgctgaggaatcaatgcactaagaaaccattccaaaaacatattgtaacgaaatactactttcgccatgacgcatcattgcgccatcacatggcgacgcctgcatcaacaaaattaacaaaaaacgcagtctgcgttatcgcttccatttttcacaaagaatttcgcagaatgatttgttaagctgatggcctggtggtttaaggaagcgacttatgcgtcaacgaactatagtttgcccattaattcaaaatgatggctgttatctgctgtgcaaaatggccgacaaccgcggcgtctttcccggtcagtgggcgctgtcgggcggcggggtcgagccaggcgaacgcattgaagaggcgctgcgtcgggagattcgggaggaactcggcgaacaactgattctgagcgatattacgccgtggaccttccgcgacgatatccgtattaaaacctacgctgatggcagacaagaagagatttatatgatttatctcatcttcgactgtgtttccgctaaccgcgatatatgtattaacgacgaatttcaggactacgcctgggtcaagccagaagaactggcgctgtatgatttgaatgtagcgacacgccacacattagcattgaaagggttattataatgacgacagccgcttcaggctgtctttacgcttttaacatgcggctagccgggaacaaattcaccatctaaaaagagttttccgttttccgcatgcataacgagcgcattaagatagtccggatcaaactttacgccgcgcttattttttgcaatatacgtcaaacaatgattatgggtaaaaatgactatatttttattctgcgactttttcagtaacgtattgattgaagcataaataccgctgccgcaatccatcatttttttatccaccgtaagcgacctgcccgcagaaaaccaggttgccgactggatggtgcgcaccgtattactggaatagagattgtaattttgtatatcggcactgaaggctttacccagcgctctggcatcttgcgcacccttgaccgtaatccccgtgctgtctgacaggcaggtattatcggaacgatcgcaccgctcggcatggcggaataacacgactaccggatgctgcttcgccagcgccgccagcgctttaccgttaatctgcggtagaccgttaccactccaggcatgttgtgaggtcaacccggcgataataaccaacgcccccgccagaatcgcgaaatagcgtttgtttttaataaagcgtagggtaaatgccagcacattaacctctcaggcagacagtgcagctaacttaatagcaatacaattaaaatgaaattccgcaacggaagaccaggccagaaacataaaaacagcttttgggcatgcataaaatgccttaaactttcggcgaaagcaaagcataattccgttaaaaattatctttttacttcaccttaatttcttaatgttaatttaatcttcatccagtagggttcagctaaatgcgttaaaaaataagcccttttctattgccgaaatatttgaaaagcggctttcaatggctgaaggaaaaatgatgtcggactttttgcctttctcccgtccggcgatgggcgcggaagagcttgctgccgttaagaccgtactggactcaggttggataacaaccggcccgaaaaatcaggaactggaagcggcgttttgtcggctaactggcaatcaatatgccgttgccgtcagttcagccactgccggtatgcacatcgcgttgatggcgctgggcattggtgaaggcgacgaggtcattacaccgtcaatgacgtgggtttctacgctaaatatgatcgttttactcggcgcgaaccccgtcatggtcgatgtcgatcgcgatacgctgatggtcacgcctgaacatatcgaagccgcgattacgccacaaaccaaagcaattatccccgtccactacgctggcgcgcccgccgatctggacgctatttacgctcttggcgagcgttatggcattccagtgattgaagacgcggcgcacgcgacaggaaccagctacaaaggtcgccacattggcgcccggggcaccgcgattttctccttccacgccattaagaacattacctgcgctgaaggcggtatcgtcgtcacggataacccgcaattcgccgataaactgcgcagtctcaagtttcacgggcttggcgttgatgcctgggatcgacagagcgggggacgcgcgccacaagcggaagtcctggcgccgggctacaaatataatttgcccgacctcaacgccgctatcgcgcttgcccagttacagaaactggatgcgcttaacgctcgacgcgccgccatcgcagcgcagtaccaccaggcaatggcagacctgccttttcagcctctgagccttccgtcgtgggagcatattcacgcctggcatttattcattatccgggtcgatgaagcccgctgcggtattacccgggatgctctgatggcatcgctgaaaacgaaaggcatcggcacagggctgcatttccgcgccgcgcatacgcaaaaatattatcgcgaacgtttcccaacgctcacgctgcctgacaccgagtggaacagcgagcggatctgctcactgccgctcttcccggacatgaccgagagtgactttgatcgagtcattaccgcccttcatcagatagcaggacaataagcatgtttgacgccgcccccataaaaaaagtctcggtggttattcctgtctataacgaacaggaaagcctgccggaattgataagacgcaccaccaccgcctgcgagagcctgggcaaagcgtgggagattttattgatagatgatggtagcagcgatagctcggcggagctgatggttaaggcgtcccaggaggccgatagccatatcatctctattttactcaaccgtaactacggtcaacatgcagcgattatggcggggtttagccatgtaagcggcgatcttatcattacgctggatgccgatctgcaaaacccgccggaagagatcccgcgcctggtggcgaaagccgatgaagggttcgatgtggtaggcaccgtgcgccagaaccgacaggacagcctgtttcgcaaatcggcgtcaaaaatcattaatctgctgatccagcgcacaacgggcaaagcgatgggcgattacggctgcatgttacgcgcctatcgccgccctattatcgatactatgttgcgctgccatgaacgcagcacctttatccctattctggccaacattttcgctcgtcgggctaccgagatcccggtgcatcacgctgaacgtgaatttggcgactctaaatacagttttatgcgtctcattaacctgatgtatgacctggtgacctgcctgacgacgacgccgctgcgcctgttgagtctgctgggcagcgttatcgccatcggcgggtttagcctgtcggtattgcttattgtacttcgcctggcgctggggccgcagtgggcggcggaaggcgtatttatgctctttgccgttctgtttaccttcatcggcgcgcaattcatcggtatgggactgctgggcgaatacatcggtcgcatttataacgatgtccgcgcccgcccccgctattttgttcaacaagttatctacccggaaagcacgccgtttactgaggaaagccaccaatgaaagccgttatttttgcctatcacgatatgggatgtcagggggtgcaggccgtactggatgccgggtatgagattgccgcgattttcactcatgccgacaatcctgcggaaaacaccttttttggctccgtctcccggcaggcggcagaattagggattccggtttatgcaccggataacgtaaaccatcctatctgggtcgaccgcatcgctgagcttgcgccggatattattttttcgttctattaccgcaacctgttaagcgaagaaattctgcacctcgccccggctggcgcgttcaatctgcacggttctctattgcctgcctatcgtggccgtgcgccgctaaactgggttctggttaacggcgaaagcgaaacgggcgtaacgctgcatcgtatggtcaaacgtgccgacgccggagagattgtcgccagtcaacgcgtcgctattgcgcaggacgatgttgcgcttaccctgcatcataagctatgtcaggccgcgcgccagttgcttaatagcatcctgcccaccatgaaatgcggcgatataccttctgttccccagcgtgagtctgactctacgtattatggtcgccgcaggccggaagatggccttatcgactggcacaaaccggtttccacggtgcataacctggtgcgggcggtagccgccccctggcccggcgcgttcagctataacggctcgcaaaaattcactatctggtcttcccgaatgtgtccggatgcgcaaggcgcgcttcccggctcggtaatttcggtctctccgctgcgggtcgcctgcgccgatggcgcgctggagattattaccggccaggccggagacgacattactgtacagggctcgcagcttgcacagacgcttggtctggtggcgggcgcgcgtttgaaccgtccaccagcgaccagcggtaaacgtcgcattcgcgttctcatcctcggcgtcaacggttttatcggcaatcatttgaccgaacggttactgaatgaagagaattacgaggtctacggtatggatatcggcagcaacgccattagccgattcctgctccaccctcgatttcatttcgtggagggagatatcagcatccactcagaatggatcgaatatcatgtcaaaaaatgcgatgtcgtactgccgctggtagcaattgcaaccccgattgaatacacccgcaacccgctgcgcgtctttgaacttgattttgaagaaaacctgcggattatccgttattgcgtgaaataccgtaaacgcgtggttttcccgtctacctctgaagtgtacggcatgtgtacggacgcctcttttgacgaagacaaatcgaatctgatcgtcgggccggtgaataagccgcgctggatttactccgtttccaaacagcttctcgaccgggtgatttgggcttatggcgaaaaagagggattgcgcttcacgcttttccgtccctttaactggatggggccgcggctggatagcctgaacgcggcgcgtatcggcagttcacgcgcgataacgcagttgattctgaacctggtagaaggaacgccgatcaagcttatcgacggcggtcagcagaagcgctgttttaccgatattcgcgatgggatcgaagcattattccgcattattgtgaatgatggcgatcggtgcgatggcaaaatcattaatatcggcaatcctgacaacgaagccagtattcaggaactggcgacgctgttgctcgacagttttgataagcatccgctgcgctgccatttcccaccgtttgccggtttccaggtcgtcgaaagccgtagttattacggcaagggttatcaggatgtcgcacaccggaaacccagtatcgacaatgccaggcgctgtctgggctgggagccgtctattgcgatgcgtgatacggttgaagaaacgctggacttctttctgcgtagcgtcgatatcgcggaacgcgcatcatgacgaaagtcggtttacgcattgacgttgataccttgcgaggaacgcgtgaaggtgttccccggctgctggcgacattgcatcgccacggcgttcaggccagctttttcttcagcgtcgggccggacaatatgggacgccatctttggcgtctgataaaaccgcgatttttatggaaaatgctacgttcaaacgccgcttcgctctacggctgggatatcctgctggccggtaccgcctggccgggaaaaaatatcggcaacgctaatgccgggattattcgtgaaacggcaacataccatgagacgggactacatgcctgggatcaccatgcgtggcagactcacagcggccactggagtatccgccagcttgaagaagatattgcgcgcggcataacggcgcttgaggccattatcggaaaacccgtcacctgctcagccgcggccggctggcgagcggatgggcgcgttgttcgtgcgaaggagtcgttcaacctgaggtataacagcgattgccgtggaaccaccttattccgtccgctactgatgccgggccagacagggacgccgcaaatcccggtcaccttacccacgtgggatgaggttatcggccccgccgttcaggcgcagtcgttcaatacctggattatttcccgtatgttgcaggacaaaggcacgccggtatataccatccatgcggaagtagaaggtattgtccatcagccgctgtttgaagatttgctcgttcgtgcacgcgatgcggggatcaccttttgtcctctgggcgaactgctgccggcatcgcctgagtctctgccgttggggcaaattgtacgtggacacatccctggccgtgaaggttggctggggtgtcaacaggcagcgagcgcctcatgatgaaatcgatacgctattatctggctttcgccgcgtttatcgcgctctactatgttattcctgtcaacagccgcctgctctggcagccggatgaaacgcgctatgccgaaataagtcgggagatgctggcgtctggcgactggatcgtgccgcattttctgggattacgttattttgaaaaaccgatagccggttactggataaacagtctgggtcagtggctttttggcgctaccaattttggcgtgcgggctggcgctattttaacgacattgctggccgcagcgctggtggcatggctgacgttccgcttatggcgggataaacgtaccgcgttgctcgcctccgttatctttctctccctctttgccgtttacagtatcgggacgtatgcggtactcgacccgatgatcgccctttggcttacggccgggatgtgttgtttctggcaggggatgcaggccacgacccgaatgggcaagattgggatgtttttgctactgggcgcaacctgcggtctgggtgtattaactaaaggcttcctcgccctggccgtacctgtggtgagcgtgctgccgtgggtcattgtccagaaacgctggaaggactttttgctttacggctggctggcggtcttgagctgctttgtggttgtccttccctgggcgatcgccattgcgcggcgcgaagccgatttctggcattactttttctgggtggagcatatccagcgattcgccatgagcgatgcccagcataaggcccctttctggtactatctgccggtactgctcgcgggaagtttaccgtggctggggttactgcctggcgcgcttaaactgggctggcgcgagcgaaacggcgcattctatttgctcggatggacgatcatgccgcttctctttttcagcattgcgaaagggaaactgcccacctatgttctttcctgtttcgcaccgatagcgatactcatggcgcgcttcgtcctgcataacgtaaaagaaggcgtcgccgcgctacgtgtcaacggcgggatcaacctggtgttcgggttagtcgggatcgtcgcagcgtttgtcgtctcctcatggggcccgctgaaatcgccggtgtggacgcatatcgaaacctataaagttttttgcgtctggggcgtctttactgtttgggcgtttgtgggctggtatagcctctgtcatagccaaaaatacctattacccgcgttttgtccgctgggactggcgctgctgttcggcttttccatccccgacagggtgatggagtccaaacagccacagttttttgtcgaaatgacccaggcgcctttggcatcaagccgctatattcttgccgacaacgtgggcgtcgccgccgggctggcctggagtctgaaacgagacgatattatgctctacggacacgcgggcgaactcaggtatggtcttagctatcctgatgtgcaggataaattcgttaaagccgacgattttaacgcctggctcaaccagcatcgtcaggagggcattattacgctagtactttcaatagccaaagatgaagacatcagcgctctttcccttccccctgcggacaatattgattatcaggggcgtctggtgttaattcagtatcggcctaaatgatcggcgtcgttctggtgcttgccagtctgctcagcgttggcggtcagctctgccagaagcaagcgacacggccattgacggcgggcggacgccgccgtcacctgatgctgtggctgggcctggcgctgatatgcatgggcgcagcgatggtgctgtggctgctggtgctacaaaccctgccggtgggaattgcttacccgatgttgagtctgaattttgtctgggtcacgctggcggcctggaaaatctggcatgaacaggttccgccccgccactggttgggcgtcgcattgattatcagcggcattatcattctggggagtgcggcataatgggcgtaatgtggggactgataagcgttgcgattgcctccctcgcccagttgagtttaggattcgccatgatgcgactgccatcgatagcgcatccactggcgtttatttccgggctgggcgcatttaatgccgcgaccctggcgctattcgccggtttggcggggtatctggtttccgtcttctgctggcagaaaacattacacacgctcgcgctcagcaaagcctatgcgctactgagtctcagctatgtgcttgtctgggtagcctcaatgctgttacccggtttgcaaggcgctttcagcctaaaagcgatgctcggcgtattgtgtattatggcgggggtaatgctgatttttctgcccgccagatcatgatggcttgcgcgtcaaccgctgccattcgtcgcaggaataacagcgtgcatcaacgatttttaaggtctggtgtttttcccgattaatacaatactgcgcatcctgtaaaggcgacaggatatcgccgggactcagtaatatcatggaattcgcctcggcgatcatttttagcgaaccgccgctatcgcacagcaccagaacatggcacgccctctttttgacataatgcgatttcttaaccaaccattccatagcgcccccgtttcacgctgattgttcataacacgttacacatcaacggataaacaaaacggcaatagcgatggaatggttgtatattaacctaacattaatttttacagttctcacacacccactgctggagcgcacggcgagatattttaatccctccgtttttcagttctgacggcatcgtcaaccagcgaaccggctgttgaaaacgcgccagcttatcacgaacccattcagcgaggttcacgtctccggcctgcgatgcatactccacaaccgcaacgggacgatgaccaaactctttatcttctaccggcacgacgaaggcttgttgcaccagcggatgcgcattaataacgcgttcgacttcctccggctgaatgccttcgccgccgctaaagaacaggttgtccagccgcccggcgatggttagcctgccgtggttcagctcgccgcgatcgcgcgtggcaaaccagccttcgtcattaaccagcgggatcagtttgccatcacgccagtaaccttccgccatactggcggcgcgcagccagacttcattatcgacgattctgatctctctgccgggaagcggcgcgccaacatcatccgaaccatcggcctctttggcgcataccgtagacgcgaactccgtgagcccatacccgcaccagcagcgaatcccttgtttgctggcctggtcggtgagttcaaccggaatcaccgcgccgccgagcaaaacggctttcagcgtcaccgccgcccgattcgccagcagccgccacagctgcgtcggcaccagcgaagcatgagtacaccctgccagcatctgctccagcggttgcttatcgcgtaccgtcatgcgcgccccggcgaagagccaacgccacataataccctgcccggatacatgaaacagcggcagcgatagcagccagtcatcctgagggccaaacggcattagcgaaagcaccccctgcgcgctggcaagatgcgcctggcacgtatgtacagccgcttttggcaatcctgtggaacccgatgtcagcgtcatggaaaccagacgctgcggttgccaggccacagcatacgccgctgtactcttttgtatctgcaacgcggttaatccagaaaacgcattttcgccttccagtgtcagcgcaaaacgcagcgttaacttcggcaccagcgcctccagcaatgtctggggcaactgcgggttgacgggcagaacccgcgcgccgcactgcatcagcgcaagccatgccaacagagtgcgcggctgattcccggcgcgcagcaggacaccatcgccctcgcgtacgccctgcgcggcaaacccgcccgccagcacatcaatacgctcacagagggcgcgccagcttagcacttcatcgttcaggcgcagagcgggcgcctgactgcgaacctgacgccagtggcgccacggccaatccgtgaatgtcataacagtcgttccagctcctcacgcttcagacaaggcaacgcgctaccgggccaggggcgaatctgttgcgcctgcatcagatgcaaggtatccagtccaggcagcgttcccggcgtcaaccaggcggcaatccgcgccagttgcgtcaggccgaggctggactcgatcgaagagctgatgaccgccgtcagtcccaacgcatgggcggcagcgacttgctcacgcactttatcaagcgatccggtcagcgtaggtttgataaccacagccctgacgccctcttcggcttcaaaggtgaaatccgcttcgcgcagactttcgtcccaggcaatcgcgatgccggtttcacgggcaaaggcgcgggaatcatcccgcgtcttacacggttcttcgagaaaggcgatacgagcgcggtaatccggattaacatactttgcaaactgttgggcttttagcggcgtccaggcgcgattcgcatccagacgcagatgcagatccgggatcgcctccagcagcaaattaaccaccatgccgtcgcgtaccgcttcataaagacccactttgaccttagcgattttctcgccgggcatatcggcaagccgcagcaccaaatcgtcaggatcgccagtgcataacggcgcggcgcgatagtccgccgcctccggcaagacgccagtcagttccgccagcgcgcagcttgcgccaaacgcgaccgaaggcatctcgggtaatccctcgctcccctgaagccagtcgttcacccatgttagtagcgccgtctgcgcctcttcccacgtttcctgactgaagcccggcagcggagagatctctccccatccctcacgctcgccgtcacgcagacaaacatacagcccgtcgcgagtttttaaccgcctgtcgcgcagaaccacccccgcgtccatggggatctgccagcggtatacctgcgcgctacgcattatgggttccgtttgaatttgctgaagtcaggctgacgcttctggttaaaggcgttacggccttcctgcccttcttccgtcatgtagaacagcatggtagcgttgcccgccagctcctgcagcccggcctgaccgtcacaatcggcattcagcgccgctttcaggcaacgcagcgccatcggactgttttgcaacatttcgcggcaccagcgcacggtctctttttccagatccgccagcggaacgacggtgttaaccagccccatgtccagcgcctgttgcgcatcgtactggcggcacaggaaccagatttcacgcgctttcttctgaccaacgatacgcgccatatacgaagcgccccagccgccgtcaaaggagccaactttcggaccagtctggccgaagatggcgttttccgccgcgatggtcaggtcacacatcatgtgcagcacatgaccaccgccgatggaatatcccgcgaccatcgcgacaaccggttttggacaggtgcgaatctggcgctggaaatccagcacgttcaggtgatgcacgccggagtcatcctgataaccgccgtaatcgccgcgcaccttctggtcgccgcccgcgcaaaacgctttatcgccttcgccggtcagaataatcacacccacgttgtcgtcgtaacgggcatccgccagcgcctgaatcatctctttgacggtcaacggacgaaatgcattgcgcacctgcggacgattaatggtgatttttgcaataccgtcggtggatttttcataacgaatgtcggtgtaaccctccgagcagtcgtgccattctaccggtgcgtaaagcattgtttcatcaggatagatcatagtgtgtcctttagtcagagacgcagaatctgagccagactgtctaccacgccagcggggttttcccgatgcgcgttgtgtccggcgttacgaatgacatggcatgtcgccgccacttcctgcgccagggcgcggaatttgctgtcgcgttcgccacataaataataaaacggaaatgccagcgcgttgagcgcctcgcgtaaatccggctggacggcaagcgatgtcgcctccagcatcgcagccagcgtttcgccgttattctggctacgcagcgccgttagcgcctgtctttgctgcgccgtcagcgaggcgaacaccggctgctgataccagtcgtgaaaaacctcagtcaatggttcatgacgaaaacgctctgcccagcgcccgtcggacaatcgtctttcagcgcgcgcctgttcattttgcagccccggatgaccgccttcaaccaccaggccgcacaggccgggtattccctggcaggctgccatcatcgccacccggccgccaagagagtatcccaccaaccaaaactttagtatgttgtaactaattaacgtagcgcgcagcaatctgatgacatcggcaaatccgtcgaccggaatagccgcagatccgccatgtcccggtaagtcaatatagagccgcgaacagccgtgaaactgttcgccaaccggctgccattcgtggcaatcgccagaaaaaccgtgcaggaaaaccagcgagggcgtcccaggctgtccgggcatgtgctgcgcgtgcaacatcatagatggcttacctgagccaaaagttgctgcaacgtctgcgcgccgtccgtatcgtttaccaccagctcaatcaccgttgtcgccggggttcgccacgcgccagccagcgcagactccagttcttcccagttttccgggcgatgatagcgcaggttaaacatggcggccgcatggtcaaaatggacgttttgcggcatcaaataaaagcgctcacgtttgctttgcggcgtcggcagcagggagaagatttgcccgccgttattgttgaccacaatcaacacaaacggcgcggatacctgacgtagtaacgccagcgcgttaagatcgtacagcgcggataaatcgccgacgatagccagcgtcgatttagcgctggcgcgctgcacgcccgccgccgtggaaagcaggccgtcaatgccgctcgccccgcgattgctgtataccggatagccagccggcaactgtgacagcgcgtcgatcagacgcaccaccagactattgcccacgaacaattgcccctgctccggcagatagtcgcggatacggtgcgccagctgcgcttcgccaaaggtgtctcgctgcgcgaccacccgttgccacgccagttccgccagacgcgggatctctacacaccacggtttacgtttttccgccggatgcagttccagccaatcggcgattttcgctaccagtctgcgtccacgatggtgcgccgggtccagacgaccttcaatattgtcgattacccagtactcttccggctcgcaggttgcctgccattgcagtaagcgttttccggtaaggctactgccaagctggacgacaatctgcgcctgctgcagttcggtcaccgctttggcgttgccgagccacaggtcggcgcacggcagcggctgcccggtttgcgacaatacgtcgccaattaatggccatcccagagtttgcgcccactgcgccacttttttgccttcttccgcgctcatacgcccggcgacgacaacgccgcgtttttgtcgccagaagaaccagtcgcgctgtttgtcgctttccagtcgacgcgcttcgcgcagccagggtttttcatcctgccaccagtcgccgagacgctgctgccagaccagaccggtatcattcatatcgccatacagcggttcggcaaaaggacagttaatgtgcagcgcgcccgcatgaagcatggcgagcgcattgtcgatggtcgacaccagccagcgcgccggaatatcctgcgtgggacgcggcaacgacaaagtttgggaggggtgcgaggcaaacatccccgcctgacggatcgcctggttggcgccgcagtcaatcagctctggcgggcgatcggcggtaagtaaaatgagcttctcgcccgtcagccccgcctcaatcaacgccggatagaggttcgccacggcggtacctgaagtgacaataacggcaaccggctgttggctgactttcgccagccctaacgccagatgaccaagcccacgctcatcaaagtgcgtatggtgaataaaagcaggattctctgccgccgccaacgtgagcggcgtggaacgggaaccaggggcgatacaaacatgcctgacgccatgacgggttaaggcttccaggatgaccgccgcccagcgccggttaaatgcacttactgacatgagtttgtccggtatcaatcattgggactaagtataaagagctgcaaaaatggattattgatatgggtcgggaatatgtgactcattacgcatccatctgcaataaggtacgtaacccggccgctttattatctatttcctgccattcctgttccggatcggagccgcggacgattcccgcgccggcatacaatcgcaccacattggccgtcactttggctgaacgtaacgtcacgcaaaactcactttgccgcgtggagagatagcctgccgacccggcataccattcacgttcgaacggctcatgttgttctataaaacaacgcgcgggttcacgagggatcccggcgaccgctgcggtaggctgtaactggtgcaggcagagcgtgtcgtccgcctgattaagcgccgtccagatacagcggcgcaaatgctgtaccttgcgcagtctgagcacctgcggcggcagcacatccagcgagtgggtgcagttttgcagtcgctggcagatgtcttcgacaaccagcatattttctcgctggtttttatcgtctttcattaaccattcgccaagctgccaggctttatggttatccggatggttcgccaccgtcccggccagcgcttcggtacgcagcgccgtttcacgccgccgccagagccgctccggcgatgatcccagaaaggcggtatcggcggaaaaggccataaaaaagtggtagcagttgagatttaaacgacgactggacgccatcatcgcggcggcattgaccggacgggagaattgtaagtcggtggcccgcgccagcacaactttatcaaacgcctcttgcgcaatggtgtgggtggcctgctgaatcagcttcacccaaccgtctttgtccggccagtgttgttcgctcgtgagcgaaaggcgtagcgccggaacaggcttaatgccgaccagagaagcgagaaacgctttcgcctggcgcgcatcatcgcgtagcgaaacgtcactgtgcagatgtaagcgtaaggtcgccgtaccaccgctacgtcgccactccagccgcggcagcaataagtagccctctttcggctcgaacgcattcagcccccaaatacgcaggtcaggctgcgcgtgctgacgtaaaaaccgttgcgccagatcgagcgatgaaaatacggtgatggccccgagaacggcagcttcttcgtcgccattgcgctgttgccagtagaattgcggaaaggatgactggctggccagccagctcaatgcatcgaaggcatcgtttaaagggaaaggcgcatcgaaaacgcaaagccctggcgtcgccggtatctcttgcgatagctgacgcgtcagattttccagcgcagtagtaatagaatgcacgcggaccctccctgttaaaaaccccacattatacggggtactgccctaaaaaagcagtacctcatttagggagggttgcaattctgttcagtggggggatttagcgccgcgccagcagcagtccaagcaccagtcctaccgccgcgcctacgccaataccctgccagggtttttcatgaacgtagtcatccgctttataaacggcctgctttgcccggtaataatagctatccgacgcatggcttacgcggtttttcacctcttccagcgcttgttccgcgcgggctttcagctcaatgtatttttgatcggcgggatcgcctgaggaacgtaaaacctcttccagcgtttcgctgagcaaagtcagatcatcatcaacacgtgattcaccaaattgatatgacattctcattctccgttgtgttaacacctgctcctaactatagtcaacggtttcggtttatgcctgatgaacctcccgcgccattccccggtgcggaatgccgtcttcgtcataaacatcggtgacgggaataaaaccaaaccgcgcataaaaaggttgcagatgcgcctgcgcccccagatatagcggcttatccggccagtgccgcccacaagattccagcgttttcgccattaattgctggcccagtttcgcccctcgccaggcatcgctgacgatcacccggccaatgacaaccgggtctgattcgttatcgcttttcagaatcctcgcatacgccaccagttcatcctgatgccagcccagaatatgccgattgtcgccgactaaatcatcgccatccacatccaggtaaggacagcgctgttctaccacaaagaccgcgcagcgcaatttgagtaacgcgtaaagttgaggaacggtaagttcgctatggtggagatcctgccagtcaatcatgatgcgctcctgtgttgtggtaatcttgggttaaacgataaccaaacgtgtatggacaagatggaattaatttttttaggtacgtccgcaggcgttcccacgcgctcacgcaatgtaacggcaattttattacatctgcaacatccaacgcagccgggagtatggctttttgattgcggcgaagggacacagcatcaaatgcttaataccgcgtttcatcccggtaagcttgagcgcatttttatcagccatcttcacggcgatcatttgtttggcctgccgggtctgctatgcagccggtcgatggcggggaacccccatccgctaaccgtatacggacctcaaggcgtgcgtgagtttattgcaaccacactgcgtcttagcggttcatggaccgattttccgttgcaaattgaagaaattagcgcaggtgatattcttgacgacggtctgcgtaaagtgaccgcgttcaggctggagcatccactggagtgctacggatatcgcgttgttgaacatgacaagcctggcgcgctgaatgccagggcgttaaaagccgcaggcgttacgcccggcccgctgtttcaggcgttgaaggcaggaaaaaccgtcacgcttgccgatggaaggcagatcaatggcgccgactaccttgctcccgccgtggccgggaaatcagtagcgattttcggcgataccgcgccctgcgaggccgccctcgcgctggcgcagggtgtggatgtgatggttcatgaaaccacgctggatgcgtcaatggaggagaaagccaacgctcgcggacacagctccacccgtcaaaccgcgacgctggcgcgggaagctgccgttggtcggctaatcatgacccatattagctcacgctatgacgataaaggctgtcagcgcttactggcggaatgccgcgctattttcccggcgacggagctggcttacgatttttctgttttcccggtttagcgctccattttttgtcctcattgccgataacactaaaaaaggcaggctttcataatgaggttaggatggacaattttcagaaagatattgatgacagggccaatttaaccctgtccaaccgttttgaactgctgttattccgtcttggtacatcgctgcatgaacagaagtcagagctgttcggcatcaatgtatttaagctgcgcgaaatcgtaccaatgcccgcctttacgcgcccggcaggcatgaaagcgccgctattgggcatggtcaatattcgggatcaggtcattccggtgattgatttgccagcggtagcgggctgcaagccggaaaccgggctgaatattttgctgatcaccgaatatgcgcgcagcgtacaggcatttgccgtcgagtcggtggaaaatattatgcgtcttgactggcaacaggtgcataccgccgagaaagccgtcaacggtcgctacatcaccagtattgcctgcctggatgacaacaaagaaaccaacaacctggcgctggtgctcgacgttgagcagatcctttatgatattgtcccctccagccacgatctgcgcgccaccaatctgaagaccaataaattttatattaccccaggcgcggtagccattgtggcggaagactccaaagtcgcccgcgcgatgctggaaaaagggctgaacgcgatgggaattccgcatcagatgcatgtgaccggcaaggatgcctgggagagaatccagcaactggcgcaggaagcggaggccgaaggtaagccaattagcgagaaaatcgcgctggtcctgacagatcttgagatgccggagatggatggctttacgttaacgcgtaaaattaaaaccgatgaacggctgaaaaagatcccggtcgttatccactcctcgctttccggcagcgccaatgaagatcatatacgtaaggtgaaggccgacggctacgtggctaagtttgagattaacgaactctcttcggtcattcaggaagtgctggagcgcgcagcaacaaacagccagggaccactgatcagccgcaaaagcgcctgacgtaacaggggatgcctacagtacaggcatcccctgacgcttagtgagacaagccttccgccagttttaccagtttaataaactccgcgcgatagccttgtctatcttccccgcgcgcctgttcaccccatttaataatttgcggccaggtcgtatctgccagcgtttctgagccacgcagtttttgcccgaaagccgctaccgccgcgcggaaacgaaaatcttcagaggcgtcagcaaagatcggcatctttcccataacgaccgggaactcggctaatgtactttcgctgccctgcggcgctttccagcgcaatttgagccacgccagctcgcttgattttgttgtctttgaggcggctttgttctgagcgtagcgcagtttatccaccgaggctttctgcccgttaagcgtcagttcaaagaatagcgtgacgtgtttacccgcgccgatatcaccggcatcaaccttatcgttattgaaatcctcgtcgcgcagttggcgtttttcataaccaatctgccggtactcagtcacccactgcggattaaattcgatttgcgattttacatctttggcaacggtgaccagcgtttgatgcatctcatccttgaggactttttgcgcctcagagagggagtcgatgtagctgtaattgccgttacccacatcagcaattctcaccatcatggcttcgttgaaattgtcatcgccgacgcccagcgtagataaggtaatacctttctcgcgctctttttttaccagcgcttcgatgtctttgggatcggtaataccgaggttaaaatcaccgtcggtggtcaacaaaatgcggttaacgccgcctttgataaaccctttttcggcctgctcgtaggctagtcgtaatcccgcttcaccaccggtactcccgtaagcatccagattatcaattgccgctttaatcgcggttgtgttatttcccgctgtagacgccagcgcgacgtgagtgccgcccgcgtaggtcacaatcgtgatgttatcctgcgcacgcagatcgttcaccaacagttttagcgccgaccggatcaacggcaggcgttccgctggctgcatagagccggaagtatcaatgagaaaaaccaggttggcaggtggtagatctctggtctgcatgtcccgggcctgaacatcaacttttaatagcgtacgctgcgcgttccacggcgagggagccagttcgtatttaaccgcaaatggcatcggtatacaggccgcaatgggtttagtgttatcctgcttatccgcaacgggctgaggggcgggaaagtagttgagcatctcttctacccgcacggcttccggcggcggcagttgtccctgattcagaaagcgccgcacgttagcgtagctgccagtgtctacatccagactaaacgtggcgagcggcgcctgacttacctgtttaatcggattttcatcgtagtgttcgtaacgcgcggtccccattacattaccgccttgtgcagcgaacgcttttggtgccgcggcacgtgtctgcattacatattgcggtgcttcggctgttgccagagatgccgctttggcatctgccagggctttggcttcagcatattcggctgcttttttcgcagcctgttgggcggcctcggcttgtcttttctggacagtgtcatccccggcctgagcgctattttctttctggatagtccgcttctgttttaactcagccggattatttccctgcgggtcggagggctccggcccacagcccgagagaataaccccacccaacaacagcattaatgtttttccgttaagcatacaaattccttttcaattatattcgggtaattctctgcagatgtcctgcattatattccgcgttacttttattatcagcatgacgaaagtagaaaataattttacctgcgttaatagccaccaataataaaaaagataattatatttttgaggtaaataatatttacgtttaagatgaacggcttaatcagttgctggcgttcgacccacagattctgcgtgaagaacactatttacaggtaaccgatttaccaaaagtgaatatataagatgggggactatctgcactgtgccctcgccgatacttccttttacaacccaccaaacagcaatccattaagccgtgccgacactcacgttattgatggaaagatattatatgctgccgtcacatgaaataatgaactgagcgcgatcggacgccttgaaaaacgctgacagaaatacgcttcagatcaaatttttcccattgaagtcgatgagataaacatttatccgggaaacgggtcacgaaaacagttgggagagttgttccactgcctgatgcaagaaatggacaaactgctgagtttttatcagcgatgcctgagaaatgacagtcacgttataatttttatagcggagtaatgggccatatgtttaacacttcgacaattattgtgaattacccatatgaaaccgctggcgcttacggaaccgcccaacatccggctcttcgttcgtcgggacgtgttgggtttcggctacgcctcacccaacgagtctatggtctctatgcgtcacaggttttcataagttggatgcaatccaacatttagaggctcaggtattgctcatcagcctcaaccgccgataaatcggcggttattgacatcatcaacgcggcattacatcagcggcatcgccagttgcacaaggctaatcagcggctgcggccagacgcccagtaccaacaccagcaacgcggagatcagcaccacgataccgcctgcgctgtactgccagtttgtcggcgcgtcgcgtcccggttgctgcggcgcgtgcaggtagagactcaccgcaacacgcaggtagtagtacaaaccaatcgcggaacccactaccacggcggcgaccagccaccacaggctggcctgaacgccgaccgccagcacgtagaatttgccgataaagcccagcgtcatcgggatacctgccagcgacagcatcatcaccgtcatcaccgcggcaagaaccgggcggtgccagaatagaccacggtaagagtacagagaatccgcatccgggccgcggaacgggctggacatcaggctgaccacgccaaacgcgccgaggctgctgaacagataaccggccagataaacgcctaccgcttccatcgacatctcgccgctctgcagggcaatcagcgccaccagcagatagccgaggtgagagatagaagagtaaccgagcagacgtttgatgttggtctggctcagcgccatcaggttaccgaagatgatagaggcaaaggcgataatgcccagcaccacgcgtaccgcttcgctgtcgcctaccggcgcatacaggaacagacgcatcaccacgccgaagatagcgattttgctcgccgtcgccaggaaggtagaaaccggcacaggcgcgccctggtaaacgtctggcgtccacaggtggaacggcaccagagagagtttaaagcccagaccgacaatcatcaggccaaagcccgccagcagcaacggctcgtgcagcataccatcgccgaggctcttaccgagcgcttcgaaagacaggttgccggactgcgcatagaccagcgccatcccgaacagcaggaaagacgaggcggcggcggagaggatggtgtatttgatactggcttccagcgagcgtttctggcggaaagcataaccaatcaggccgaacagcggcagtgagatcagttcaataccgaggaacagcgccgccagatggttggcgttcgccagcagaattccgcccaggctggcgattaacaccagcaggtagaactcttcctggttatcgttatagccttccagccacgggtaggcaaaggtacaggtggcgaggctcgccagcagcaccagtccggtgtagagcatcgcaaagccgtcaacgcgcatcagcggcgtgacgtccattgccccggcctggccgacaaaccaaagcgaaaccagagcagcgttaagcccaatgaccgacagcgtggcattgaggaagtgattgcgtcgccacgcaatggagagcatcacaaccaccaccgtcaagccgacgatcagcagcggtagcagcgcaatcaggtgttgtggagttattgtcatggcgatttacggccttgtagtagtaacggaattaacaaaccactgctggatgttgctcatcgcagaatgcgaggtatccagaatcggctgcggatagaagccaagcagtaccagaagcaccaccagcaacagaatgataaacagctcgcgcagcgacatccctggcagttctacactggcaatctggctcttcgccttaccaaagtaagcgcgatgcagcatcgccagcgagtatacagaggcgaataccagcccaaaggtggagatcacggtaatcaccggcaccacctggtagctgccgaacagaatcataaattcgccgacaaagttaccggtgcccggcatcccgagcgtcgccaccgcaaagaacatggacagcgcaggcaaccatttcattttgccccacaggccgcccatcatacgcatgtcacgcgtatgcagacgttcgtacaactggccacacagaatgaacagacccgccgcggacaaaccgtgcgcaatcatctgaatcaccgcgccctggtacgccagctgactgccggtgtagatagcgatcagcacgaagcccatgtgggaaacggaggtataggcaatcaggcgcttgatgtcgtattgggtaaaggccatccacgcgccgtagaaaatgccgataacgccaagccacatagcgataggcgcaaactccgccgacgcgttcgggaacaatggcagggagaaacgcagcagaccgtaagcggcggttttcagcaagatccccgccaggtcgacggaaccggcggtcggcgcctgggagtgcgcatccggcagccagccatgcagcggaaccaccggcattttcaccgcgaaggcgatgaagaagcccagcatcagcagatattccacaccgtgggacatcggcgtattcagcagctcttcataattgaaggtccacacgccggtcgcgttgtagtgcacaaagaccagcgccaggatggcaatcaacatcaccagaccactcgcctgggtgtagatgaagaacttggtcgccgccgtgatacgcgttttcccgtcagaagctttgtggccccacagcgcgatcaggaagtacatcggcaccagcatcatttcccagaagaagaaaaacaggaacatgtcgatggccaggaacacgccgataacgccgcctaagatccacatcaggttcaggtggaagaagccctgatatttttcgatttctcgccaggagcaaagcaccgccagaacgccgagcaggccggtcagcaccaccattagcagcgacagtccgtcgagcgccagatggatagagatgccaaaacgcgggatccacggcaggacaaattcagattgccactgcggaataccggcggattgcgtcagtgaatagccgccctgcaaccacaattgcagaccgagcgccagcgtcagccccatggtaatcagcgctatccagcgcggcaccttcacgccaaagcgttcggtctgccagcacagaaagccgccgataaaggggattaatatcaaccagggtaataacatagctaagtatgtcccttatatttactcctgctcaggctatctcactcgtcagcccaaatcctgccagtgctcacacaaaacgcagcgcgttttgaacgtccgtaaggacggccccgtaggggtgagcttcgcgaatcatcctcacgtacttcagtacgctccggttgctgtgcgctggcggtatccggtctgacttcgccgatgacgcctgtacttcaggaacagattttcaacgaattctaaaaattatttttgggtttgtaggccggataagcactgcgccatccggcagtcgttcatccagccaacaaactcaacgcagtaccatcaacagtgccagcacaacgacagcgccgatgctcatggatgccacataccagcgcaaataaccgttctcgctcagtaccaggcctttgcctgcaaaacgggaaaggatagccggaatgttcatcaacgcattaagcgggtcgcgcttcagcagccaggcgataccgaggaatggcttgacgaatactttgtcgtacagccagtcaaagccccaggcgttataccaccaggtgcccagcagacggcccggcgcgctgttggcgatcgacgtcaccagcgtacgtttacccagccacagccatgcggcaatcagaatgccggcaatcgccactacgccagaggtaatttccagcgtcatgacgcgaccatgcgccagttcagttgtctgcggcagcaccccctgcagcggcggcacaatcagcgcgccaacaaaggtagacagaatcatcaggacaatcagcggcagatggtgggtaatccccttccctgcatgagcatgaatttgttctttaccgtggaatacgatgaaaatcatccggaaggtgtacagggaggtcatgaacgcgccgaccagacccgccaccatcagattgatatgaccgttcgccatcgccccggccagaatctcatccttactgaagaagcccgcagtgaccagcggcagcgccgacagcgccgcgccccccaccaggaagcaggcatacaccagcggaatggacttacgcagaccgcccatcttaaagatgttctgttcgtgatggcaggccagaatgacggaaccggacgccaggaacagcagcgctttgaagaacgcatgggtcatcagatggaaaatcgccgcatcccacgcctgtacgccaagcgccaggaacatgtagccaatctggctcatggtggaataggccagcacgcgtttgatgtcggtctgcaccagcgcggcgaaacctgccattaccagcgtaatcgccccgataatgcccaccagatgcagaatttccggggtcatcaggaacagaccatgggtacgagcgatcaggtagacaccggcggtcaccatggtggcggcgtggatcagcgcggagaccggcgtcggaccggccatcgcgtcggcaagccaggtctgcaacggtagctgcgcagatttaccgaccgcgccgcccagcagcatcagcgtcgcccacatcagcatgttgttgccgtcagcaaagtgcgctggcgccagctcgaccatttcgcggaagttcagcgtgcccagttcgttgtagaggatgaacagcgcgaaggcgaggaatacgtcaccgacacgggtcaccacgaaggctttcattgccgccgcgccattcttcggatcgctgtaatagaagccgatcaacagataagagcacaggcccacgccttcccagccgaggtacatcaacagcaggttatcggacagcaccagaaccaccatgctggcgataaacaggttggtataagcgaagaagcgggagtagccctcttctccacgcatgtaccaggacgcgaacatgtggatcaggaagccgacgccggtgaccacagagagcatggtcagcgacaggccgtccagcaccaggttaaaaccgatgttaaagttaccgaccgacatccacgtccacagcggctggctgaacgcctgtttgccgttggcgaagaaatccatcccgacaaacgctgtcaccaacgccgccagaccaacggagcccacgccaatggtcgcggagagattttccgaccagcgtccgcgagagaacgccagcagtacaaagccaatcaatggcagaataatggttaaggcaagcatgttcatccacgcatctcacttactgaatcgatgttcaggttctggcgacggcgatggagttgcagcaacagcgcaagtccaatactcgcttccgcagccgcaaggctgatggcgagaatgtacatcacctgaccatcggtctggccccagtagctcccggcgaccacaaaggccagcgcggaggcgttaatcatgatttccagcccaatcagcataaacagcagattgcggcggataaccagaccggttaaacccaggacgaataaaatcgcagcgaggatcagtccgtgtgttaaggggatcatgcgcgctcctccgtttttcttttcgcgcggtcatcggcgcggttgcttagcacttcgcccgcacgctcttcacgaccgacgtggaacgccaccaccaggcctgccagcagcagcatagacgccagttcgaccgccagaacataaggcccgaacagcgtaatgcccaccgctttcgcgctaatcggcgtgccgtcgatgccctggtcgttaacgcccagaatggcgtacacaatgaccgccagcataatggccgacaaaaccgccggaccaatccacacctgcggcttcagccactggcgttcctgttcgatttcgctgccgccgaggttgagcatcatcaccacgaacacaaacagcaccatgatggcgcctgcgtagacgataatttccagcgcaccggcaaagtaagcgcccagcgaaaagaacaccccggaaatcgccagtagcgatatcaccagatacaacagcgcgtgtaccggattggtatgggtgatcactcgcagggtcgcgaggatggctatcaggccacagatataaaaagcgaattccattgccctctccttacggtaacaggctcttgacgtcgataggcttggcttcgttctctgcttcgcctttatctttgccgtcgattgccatacccgccatccggtagaagttatattccgggtatttgcccggaccggaaatcagcagatcctctttttcgtacaccagatcctgacgtttgtattcgcccagttcgaagtccggggtcaactgaatcgccgtggtcgggcacgcttcttcgcacaggccgcagaagatgcagcgtgagaagttaatgcggaaaaattccggataccagcggccatctttggtctccgctttttgcagagagatacagcctaccggacaggctaccgcgcacaggttacaggcaacgcagcgctcttcaccgtccgggtcgcgcgtgagcacgatacgaccacggtaacggggcggtaaatagaccggctcttccggatacatccgcgtttcgcgtttggcgaacgcatgcaggccgatcatccagatactgcgtacctgagtgccgaaacctactaataattcttttaaggtcatggtctttgtgtcccttattgcgcctgccacagaatgacagccgccgttaccagcaagttgatgagcgtcagcggcaggcaaactttccagccgaaggacattacctggtcataacgcggacgcggtaacgacgcacgaatcaaaatgaacatcatcatgaagaacgcggttttcagcgcgaaccagacgaatggcggtaagaacgggccatgccagccaccgaagaacagcgttaccatcagcgcggaaacggtgacgatgccgatgtactcccccacgaagaacagaccgaatttcatcccggaatattcgatgtggtaaccgtccgccagttcctgctcggcttccggctggtcaaacgggtgacggtgacagaccgctacgcccgcgatggcgaaagtaacaaacccaaagaattgcggaatcacgttccacagatgcgcctggttattgacgatatcggtcatattaaatgaaccggcctgcgccaccacgcccatcagggaaagaccaagaaacacttcgtagctcaccgtctgggcagacgcgcgcatcgcgcccagcagcgagtatttgttgttgctcgaccaaccggcgaacagcaccgcgtaaaccgccagaccggccatcatcaggaagaacaaaatcccgatgtttaaatcggccaccacccaattagggctaaccggcacaatggcgaaggagagcagcagcgaagtaaacgcgatcatcggcgccagggtaaagatgacgcgatccgagaatttcgggatccagtcttctttaaagaacatcttgatcatatccgcgaccagctggagcgagccgccccagccaacgcggtttggtccataacggttctggaacagacccagcagacgacgttcgccaaagctcatgaaggccccgcaggtgacgaccaccagcagaatcaccaccgctttgagaatgctcagcaggatctcaatcagatccggtgtaatccaactcattgttgcgcctcccgcagatcctcaagacgcgcgccagccagaaccggcgcgatgccaggcatacccatcggcagccctacctgccctgccgctaacccttcagagatttcaaccggcagcgtcaccgtattgccatcgtagctaaaggagacgcgcgtcccggcattgacgcccaacttcgcggcatccgccgggttaagtttgatatacggctgcggcatacggctctggaagaccggagaacgctgagacaattcgtcgctgccaaacaggtggtaatacggcgcaatacgccactgaccgtcctgcgcctggaagcttgccggcacggtagtgaaataatccagaccgccctcagtcgcttcaatcaaacgcacgcccggatcgccgtgacgcagtttgccgcccacttcatcctggaatttgttccacgcctgcggggagttccagcccggcgcccaggcgaacggaatttcagatcgcggggcagtcggttggttattcccttccattgagaaggcgaacatggtgtctttatcctgcggctgacgtggttcatgcacgctgatattggcgcgcatcgccgtacgaccgctgtaacgatgcggttcgcgcgccagcttctgcccacgaatgcggaaggtcgcatccggcgcggcgtccttaatgccggcaaattgcggcatggcggcaatgaccgcgtcgatcacgtggtcaagctgagtccagtccacttcgcggttttcgacggtgctgtgcagtgaatgcagccagcgccagctttccagcataatcgtcttgttatcgtagtaggccggatcataaacctggaagaagcgctgcgcgcggccttcgttgttgatgaccgtaccatcgctttcggcgaagcttgccgcggaaagcaccagatgcgcgttttccataatcgccgtgcgctgatggtcaaccaccatcaccagcggcgctttggcgagcgcagcgttcacgcgcgtagcgcttgcatgacggtggagatcgttttccagcaccaccacggcgtccgcgctgccggtttccagctcgcccaacgcatcatcaagcgaaccgccgcccatcatacccagccccatgctgttcacggagcgggcaatcatagtaataccgacgtcggcgccacggcctttcagcgctttcgccacgttggcggccgcctgaatcacctcactgctaccggcgttagtgccggagataatcagcggttttttcgcgccggccaacgcctgcacaatgacatcaattttgttttgtaagtcgctgtcgataccgtcaaccgcaggcgctgtattgtccagcgcatgagcaatcgcaaagcccaggcgcgcctgatcttccaccggcgcgcgataggtccaggcggcgatatcatccagacgggtgtcatccacgttggtcacgaacagcggatgtttggcacgctggccgatgttaaggatggccgcaatctgccagtcggccactttctgcgccgccgccatttcacgcgctttacctttcaccgcctggcgtaccgccagcgcaacgcgcgcgccggtctgagtgacatcctcacccaagaccagtaccgcgtcataagattcgatctcccgcagcgccggggtgtaaattccgccttcacgcagcactttcagcgccagttgcagacgttcctgctcgccgcgcgcgataccggtgtagaagttttccgcaccaaccagctcacgcagcgcaaagttgctctcaatgctggcgcgtggcgaaccgataccgatcactttcttcgactggcgcagaatatccgccgcgccctgcatcgcctgctcggcgttgagggtgatgaagtcatcgccacggcgctgaaccggctgacgcggacggtctttcaggttcacatagccatagccgaaacgaccgcggtcgcagaggaagtagtggttaacggtaccgttgtaacggttttcgatacggcgtaattcgccatagcgctcgcccgggctgatgttacagccgatggaacactgctgacagatgctcggcgcaaactgcatgtcccatttacggttgtaacgctcggagtgcgttttatcggtgaagacgccggtcgggcaaatctcgaccaggttaccggagaattcgctttccagcgtaccgtcttccggacgcccgaagtagacgttgtcatgcgcgccatagacgcccagatcggtgccgtcggcataatctttgtagtaacgcacacaacggtagcaggcgatgcagcggttcatttcgtgcgagatgaacggccccagatcctggttgcggtgggtacgtttggtgaaacggtagcgacggaaactgtgccccgtcatcacggtcatatcctgaagatggcagttaccgccctcttcacagaccggacagtcgtgcgggtggttagtcatcagccactccaccacgctttcacggaactgtttcgcttcttcgtcgtcaatagagataaaggtaccgtcggtggctggcgtcatacaggacatcaccaggcgaccacgcgtatcttccgcgttttggtattgcttcaccgcacactggcggcaagcaccgacgcttcccagcgccgggtgccagcaaaaatacggaatatcaaggccgagggacagacatgcctgtagcaggttgtccgcgccattgacctcgtattctttgccgtctacatgaatcgtagccattagcatgcttccaaattaaaaatcgttaactcaccagcgctctttgagcaggttcggctgaataccattgattaaatgggtattactgaacggctgcttgatgccagcttcgaattcttcgcggaaatacttaattgcgctttgcagtggctcaaccgcgcccggcgcatgcgcgcagaaggttttacccggtccgaggaaacgacacagttgctcaagtgtctcgatatcccccggctggccttcgccacgctccagcgcgcgcagaattttcacgctccacggcagcccgtcgcggcatggcgtacaccagccgcaggattcgcgggcaaagaactcttccaggttacgcaccagcgacaccatgccgatttcgtggtctaccgccatcgccagcgcggtgcccagacggctgcctgctttaccgatgctttcgaactccatcggcaggtcaagatgcgcctcggtcaggaagtcggttcccgccccgcccggctgccaggctttgaatttcaggccatcgcgcataccgccggcgtagtcttcgaggatctcgcgcgcggtggtgccgaacggtaattcccacaggcccggattcttcacgcggcccgagaagcccatcagcttggtacccgcatctttgcttttcgagatgttctggtaccactccacgccgttggcgaggattgccgggacgttacacaacgtttcgacgttattcacacaggtcggcttgccccatacgccggaggtcgccgggaaaggcggcttggagcgcgggttcgcgcggcggccttcgagggagttaatcagcgccgtttcttcaccacagatgtaacgccctgccccggtgtggacaaacagttcaaagtcgaacccggtgcccatgatatttttgccaagcagcccggcctcggttgcttcggcaatcgcacggcgcagatgtacagccgcttcgatatattcgccgcgcaggaagatgtaaccacgatacgctttcagcgcgaacgcggagatcaacataccttccaccagcaggtgcggcagttgttccatcagcagacggtctttataggtgcccggttccatttcatcggcgttacacagcaggtaacggatgttcatggattcatctttcggcatcaggctccacttcagaccggtggaaaagcccgcgccgccgcgccctttcagaccggcgtcttttacctggctgacgatttcatccggagacaggccggtcagcgccttacgcgcgccttcgtagccgtttttgctacgatattcatccagccagaccggctgtttgtcatcgcgcagacgccaggtcagcggatgggtttcgggagtacggataacgtttttcatttataccgctccagtagttcaggaatggcttccggggtcagatggctgtgagtatcctcatcaatcatcatgttcggccctttatcgcaattccccaggcagcaggtcggcagcagcgtaaagcgaccatcaaaggtcgtctgccccggtttgatgttgagatttttttccagcgcggcctgaatcccctgatagccggtgatatggcacaccacgctgtcgcagtagcgaatcacgtggcgaccgaccggctgacggaagatctggctgtagaatgtggcgacgccttcgacgtcgctcgccggaatacccagcacatcggcaatagcgtagatcgcgccgtccggcacccagccacgctgcttctgaacaattttcagcgcttcaatggacgccgcacgcgggtcttcgtagtggtgcttctcgtgctctatcgcttcacgctctgccgcactcagctcaaaagcctcggtttgtggttgttgattctcgtgcataattagcggtccacatctgacataacaaaatcgatactacccagatagacaatcaggtcggagaccaggctaccgcggatcgccgagggaatctgctgcaagtgcgcaaagctcggcgtgcgcacgcgggtacggtagctcatagtgctgccgtcgctggtcaggtagtaactgttaatccccttcgtcgcttccaccatctggaaggactcctgcgccggcatcaccgggccccaggagacctgcaggaagtgggtgatcagggtttcgatatgttgcagcgtgcgctctttcggcggcggcgtggtcagcgggtgatccgctttgaacgggccttccggcatgttatcgaggcactgctgaagaatgcgcagactctggcgcagctcttccactttcagcatcacgcgggtatagcagtcggaaacgccgccacccaccggcacttcaaagtcaaagttttcgtagccagagtatggacgccatttacgtacgtcgaagtcgatcccggtcgcgcgcagccctgcgccggtggtgccccactccagcgcctctttcgcgccgtaagcggcaacgccctgcgaacgccctttcagaatagtgttacgcagcgcggctttctcgtaagaatccagacgcttcggcatccactcaaggaactctcgcagcaggcgatcccaaccgcgcggcaagtcgtgcgcgacgccgccgatacggaaccaggccgggtgcatacggaaaccggtaatggcttccaccaggtcataaattttctgccggtcggtaaaggcaaagaagaccggcgtcatcgcgccgacgtcctgaataaaggtcgagatgtacagcagatgactgttaatgcggaacagttcggagagcatcacgcggatgacgttcacacgatccgggacggtgatccctgccaacttttctaccgccagcacgtacggcatttcattgacgcaaccaccgaggtattcgatacggtcggtatagggaatgtagctatgccaggactggcgctcgcccattttttcggcgccgcggtggtgatagccgatatccggcacgcagtcgacgatttcttcaccgtcaagttgcaggataatacgaaacgcaccgtgcgcagacgggtggttcgggccgaggttgaggaacataaagtcctcgttgtcagtcccgcgcttcatcccccagtcttccggcttaaaggtcagcgcttccatttccagatcctgcttggctttggtcagctcaaacgggtcgaattcggtcgcgcgcgccggataatctttacgcagcggatggccttcccaggtttgcggcatcatgatgcgcgtcaggtgcgggtggccttcgatatcaataccaaacatctcccaggtctcacgctcgtaccagttggcgttagggaaaagtttagtgaaggtcggcacgcgcaggtcgttttcagacaacgccaccttgagcatgatatcgcgattacgctcaatggaaatcaggtggtagaaaacggaaaaatccgcggcgggtaacccgtcacggtgcgtacgcaggcgttcatccatgccgtgtaagtcaaacagcatgacgtaaggtttcggcagtttctttaagaaatcgccaacctccagtagttgttcacgcttgacccaaacaacggggataccggtgcgggtcgcctgaacggtaaaggcatccggcccaaaacggttgcgcagttcgccgataaccggatcatcaagatgatcgcgggtactccatgcagcgtcttgcgcggttaagtcggtcatattgttcaccattgcaaatggtccgtggtggtcggcagtgcttcgcgctattaaaatagtggttagcgaagtgaagtgctgctgccgacaggcgcaaattaaatctcgtccggggtacgcaggttcgtgacggcaatacgctcgccgcgtttacgttcgcgttctggctgcatattggcgcgatacacgccctgatcgcccaccacccatgagagcggacggcgctctttgccaatcgattcttgcagcagcatcaacgcctgcatatacgcttccggacgcggcggacagccagggatatacacatccaccgggatgaacttatcaacgccctgcactaccgaataaatatcgtacatgccgccggagttggcgcaggcgcccatagaaatgacccattttggctccagcatttggtcatacagacgctgaataaccggggccattttggtaaagcaggtaccggccaccaccatcaggtcagcctgacgtggcgacgcacgcagcacttccgcgccgaaacgggcaacgtcatgcactgcggtaaaagaggtcaccatctctacatagcagcaagaaaggccgaagttgtagggccaaattgagtttttacggccccagttaaccatgtcatgcagtttgcccatgaacacgtttttgttaacttcctgctccagggggtcggttacgatctcctgtttttgcagggggtaacggtcattctcaccgttaggatctatgcgggtgagcgtataatccatcttaatgcctcgcggttagcgttgacgattagcgatactgttcgtttccgggttcatacgctcgcggcgtgaacgcgcgggcgtccagtccaacgcgccaatacgcgccagataaaccagaccagccagtaacacaaaaataaaaattgcagcttccacaaagccaacccagccgctttcgcggatagaagtcgaccatgcgaacagatacagcgcttcaacgtcgaagataacgaagaacatggctaccaggtaaaacttggcagacaggcgtaagcgggcggtgccgaccgaatcgatacctgattcaaacggaacgttcttgtgcctcgcgcgtgcgcgaccgcccaaaaaccaaccgcctaccagcatcaggcagcacaggccaatggcaacgataagaaagatagcgaatgcccagtgatgagcgatgacttcagtggatgttgacatactcattgcttactcatcaaaagtagcgccagtttctctgctctttacggcagatgggcgccacatcgattcatggggaggaataaaaaaaaccctacaattactgtagaaaatgataaaaacagctaattgatgtggttttttactcctttctataaccttttgtcaactttaacaaaagttccttcacattaatttacatcaattcatcaccattaacattaagtgccatcctggagaaaatgactcttcgaccaggggggattttatgttgttgaatcgtgtccgttgtgaagcaaaagaaataacacacacctattttgacaggaatttgtgaagatgcctccccctaaatgggagtattttcttgatctgtgacacgcttttgttaattcaccccctaaaacagcaacaatttctctagttttttaacatgcaaattcataaaatggatgttctggttattttttgcccacattgaactgcgaatcgctactggctgatttaccgcaacttttacaatttgtgcggttaagcgcgtacagatgggcacaaaaaaagagccactgagcgttttttcatcgccagcggctcttttttacatttacgacttagcgccttttgcctgcgagctactcaaaacccccttccaccatcagcggatcatctccgccctctgcagaaaactggttgtaatgccatgggttttggtagctttccatcgcatggaaaatcaccatcgccagctcgttctggctattgggatcgcggcacaacagatattccgtatccggcaaaggcggtaatccgtctgcggcgcccagcacgcgaaggtcgggactcatcatttcgacaggtcgagccgttacgccaagaccggctttaacggccgcgcgtaccgccggtaatgtagacgccacataggccagccgccagggaatacccgctgcatttagcgtctccagcaccatatcgcggaatgggctgggatcgtccagcaggactagtggtacgggctctcccctttgcaaaacatactcagccgcacaataccaatgggtgggcgaggtccgcaaattcagacagtccagcgaatgaggttggttagtcgtcaccaccaaatctacttcctgcgatttaaccatgtccaccatataggcgttgcgttttacccgtacatcaagcgcgagtttcggataaaccgagctgattcggctaagcaaaaaaggcaggatagtatcagctgattcatcagaagcgccgattgttaacactccctgaagattactgaacattaatgatgaacacgcctcatcattaaaacgcaggatttttctggcgtaccccagaagctggataccgtgttcggtcaaaagtttgttacggccatggcgggcgaacaattcctttcccacgagttgctcaagacgctgcatttgctgactgaccgcagactgagtacgacataccgccgccgccgccgcggcgaaggtgttcagatcggcaacggccacgaacgttctcagcagatcgagatcgaggttaattatcggacgatttgcatttatcataatttttcacttactggcgggtcatatcgggctgacctggttaatgctgtgcattcagaaacaagcaattccatttgtaatgtgcatccttcgcagtaccgcctggttacccaggtaaatgttagaatgtaattgaaaatacgaccaaaacacttctcttacttactgatataataccaaatgcaactgatcgggatatatcaaagagaatgtgtcatacctttaggcgtctacagatttctgctaatgatggacgtgtaaatcttgtaacagcgtcaaatagtttaccgagacgcacagatacaaaaacaatatattgaacaataggttatgtataaaatcgcgtcatgataattagcagacaacgcagactacgcccccgtttcggatcattatcttaacctaaaaccgctatatttataagtattattacgaataatcttaacctgggatatgttatactaatcggaccagaaagatattattacgactttagtaaatgctttttaaatattaaataataattaattaagatttctaccattcattaattatacttaacaatagtttcacaccccccgccgccggaaaggtctaaccttctcattttacctttaatactcagtatttccgaaatagccgacgcgacactaatgatgaatgcttatctctcataaaacagataatttatgacaacataaaaaaccacattacgcgcaatcatatagaacaaaacaccatacatacagaaaaaaatagaaaatacatctaactaaatgattttatgaagttttaaacagttcgaaagcgcgttaaaaataaacaaaatcttcttctgttcactcttcaaaactcaccgtcgtgggagtacattgtttcgtgctgacttccacggcagggagtggcaataacagctaaaaggtcaagattcatgtcccccattgaaaaatccagcaaactcgaaaatgtctgttatgacattcgtggccccgttctgaaagaagcgaaacgccttgaggaagaaggtaataaagttcttaaactgaatatcggcaaccccgcccccttcggattcgaagcgccggacgaaattctggtcgatgtcattcgtaatttgccgacggcgcaaggatattgcgactcgaaagggctttattccgcccgtaaagcgattatgcagcattatcaggcccgtggaatgcgcgatgtaaccgtggaagatatctatatcggtaacggcgtttccgagctgatcgttcaggcgatgcaggcgttgcttaacagtggcgatgaaatgctggttcccgcgcccgattatccgttatggacagcggcggtatcgctctccagcggcaaggcggtacattatctttgcgatgaatcttccgactggttcccggaccttgacgatatccgcgccaaaatcaccccacgtacgcgtggtattgtcattattaatccaaacaaccctactggcgccgtctattctaaagaattgttgatggaaattgtcaacattgcgcgcgagcataatctcatcatcttcgccgatgaaatttatgacaagattctctatgacgatgccgagcatcactctatcgccgcactggcgcctgatctgctgaccatcacctttaatgggttgtctaaaacctatcgcgtcgccggcttccgccagggctggatggtgctgaacgggccgaaaaaacatgcgaaaggctatattgaagggctggagatgttagcctcaatgcgcctgtgcgccaacgtcccggcgcaacatgctattcagaccgcgctcggcggctatcaaagcattagtgaatttattctgccgggcggtcgactgtatgaacagcgtaaccgcgcctgggagttgattaacgatattcccggcgtttcctgcgtaaaaccgcgcggcgcgttgtacatgttccccaggatcgacgctaaacgttttaatattcacgacgaccagaagatggtgctggacttcctgctacaggaaaaggtgctgctggtgcaaggtaccgcctttaactggccgtggccagatcacttccgcattgtgacgctaccgcgtgaagatgacctggagatggccatcaaccgttttgggcgtttcctctcaggttaccatcaataatcttaaattcaggctacttcggtagcctgaattgcatcttcatctccctccccgcacaatgaagtctgccgcagtgaaaacaaaaggtaatctatgaagcagagccattttttcgcccatctctcccgcatgaagttgattaaccgctggccgctgatgcgtaacgtgcgtacagaaaacgtctccgaacatagtctgcaggtggcgatggtcgcccatgcgttggcggcgataaaaaaccgtaaatttggcggtcagctcaatgctgaacgcatcgcgcttctggcgatgtatcatgatgcctcggaagtactgaccggcgatctgccgacgccggtaaaatattttaattcccagatagcccaggaatataaagcgatcgaaaaaatcgcccagcaaaagctggttgatatggcgccggatgaattacgcgatattttcgcaccgcttattgatgagaatgcctggagcgaagaagaacaggcaatcgtaaaacaggccgatgcgctttgcgcctacctgaaatgcctggaggagctctcagcgggaaacaatgagtttggactggcaaaaacgcggctggaaaaaacgctggaattacgtcgcagccaggagatggactattttatggcggtattcgtaccaagtttccatctttctcttgacgagataagccaggattcaccgctttagttgccggatggcggctaacgccttatccggcctaccgttcttcccgtaggcctgataagcgtagcgccatcaggccttttcctgtctggggttaaaacggaaacaacattggaatcatcacaatacaaaccgccatcacaataagcgtgaacggcacgccaagcttcacaaaatcgctaaagctatagtttcccggccccagaaccagagtattgaccggcgatgaaaccggcgtcataaaggcggcggatgccgccatcgccaccgccatcgcaaacggatagggcgacacccccatcgatttcgccgccgccagcgcaatcggcgccatcagcaccgccgttgccgtgttagaaatgaacagtcctatgacggcacacagcacgaacaggcatcccagcatcatatacggcccatagccgccgccgatatccattaatccttgcacgaccagagagacgccgccggttttttgcaacgccagcgcaaacggcatcatacccacaatcaagataatactcggccagtggatcgctttatacgcgctttcagcatcaatacagcgaaatttccccatcagcaggcaggcgataatcgccgcgatcgggttgggaatttcatcggtcaacatcagcgccaccatcagtaccaggcagaaaatggcgtgcggcgcctggctgtgcgcaggagaggcttcgctgacctcgaccggcatattcagcaccacaaagtcgcggcctttttgccccagcaggctgattaacttccagttccccacaaccagaatgatatcgcccatcaataacggttcatcggccagcgatccttccagcgcgacgccgtcgcgtttcaggccgaccacattcagcccgtaacgtgtacggaaggcgatttcacgcaccgacttgcctatcagttcagactccggaataagcgaaatttccgccatgccaacatccaacgcctgatcggaaaaatattctccacgcaataccatcggttccagcagttgctcggcgcagaactctctgaggtcaacctccgccgccgacatatcaatcagcagaacgtcgcgagcgcgaaactccgatacgccgttcacattgacgataacccgccgaaagcgccgccagcgttcaacgccgatgacattggcgccgtaacgttcgcgcagtttaaggtcgtccagccgctgtcccaccatcggcgaaccggggcgaatcgccagacgacgagcgcgccccgtcagacggtactcgcggataagatcgcggaaagtgcgacgcttaccggcctgttgtccgggcgcatcgccttttagcatgaagcgcatcaccagcatataaacaatgccgagcgccaacaccactacccccagcggcgtcacgctaaaaaagttgaacccgtgcaggccttcacgcagcagttcactgttaaccaccaggttcggcggcgtcgccaccagcgtcatcattccgctgataagcccggcaaaactcagcggcatcatcaggcgcgaaggcgaggtctgcatatgcatagaaacgctaagaacaacggggataaagatcgccaccacgccggttgaactcatgaaagcgccaagtccggcgacggtgatcatcagtaaaaccagcatcttgatttcactgctgcccgccattttaaccagccaggtaccgaccaccgtcgcaacgccggtgcgcacgaggccgtcgccaataataaataaggcggcgataagaatgacattcggatcgctaaagccggagaaggcttccggaagggtcaaggtaccgctaaggacaaaagcaacaatgacgaataaagccaccgcatccatacgtactttgcccgtcgcaaacaacacgacggcaatcgccagtaaagagagaacccaaatcaattcaccgttcacaacatatccttgtcagatgagaagataacgcgattctgccataaatatgccccgccaaagcggggcgatatcatgatcaggtctttcttaacaccaccacatcgccgtttggttgtttagcgaccgataattgcgtcaggctatccaacgcaaaatcaacatccgccagacgcggcgtgtcggccggcgcattgaccgcaatgacgtggcagcccgcagccagcccggacagcacgccagccggggcatcttctactacgacgcactcctgaggggccaggccaagcagttgtgcgcccagcaaatacgcatccggctccggtttgccgcgtttgactcgttcggcggtgacaaacacctctggcgctggaaggcccgcgacctgatggcgcgcacgcgcgaccggcattgaaccggaggtgacgatagcccacggaatgcccactttattcaggtgattgagtaaatcgactgcccccggcagcgcggtgatccctgcggtttcagtggcttctatttgctccaggcgcgtaaactcagcggcaatttccgcctccgatttacccgccataaaatgccgcaacgaggtgatcgcctgtttgccatgaataaagcccagcacctcatcatgagcaaggttaaaacgatcggcccagctacaccacgcgcgttcaacggcaggtaatgagtcaaccaacgttccatccagatcaaacagaaaacctttacactgcacgcgagcctcctcaggcattaatgatttgattgatttcattcgcgctcaggtggtactgacgcgggcaggcatgccagacattcaacatccgctggtatttttcccacatcggcgtctgggcattaaagccgtgtgtcccggcgtcaaagtgagtgtagcgtccttctatattcaccataaaacggacatagccgaggtagcgcgcttctgtcgcggcgtcaaaccccaggaaggtgacgcgacgttcgtcgatggcttgcgtatctttgaggttggtccaggagacgtgcagcgcatggtacatctccataatatcgatgatggtacgacaggtctcttccgtcagctcgccaaactcgcgatccagctcgcgcatctgcaggccgtagccgcgttcaataattgtttgtaagcgacggtaacgctcggcgttggtgggatcgagcatcgtcatcattttgtactggttagacaaaatcagacgttgcgcgttggtcatttccattttgaactcctgtatcacgctatggcgatgaaaaaaagaaggcattggtatgccttcttttatatgcgtaatccggggtcaattacaaatcatccaggaaagttttatccagttgtttgaaggcgcgcttaagcgtgtcagctaatgcctggtaatccggctttccttctaccggcgccagcgcttgtccagcctcctgcaatttaccgcgaacttcgtaaaaccagttaaggattgaaggcggcaacggcgtcacggaacgtttccctaaccaccataatccctgcatgggcaagctcagggcgaacagggcggtcgccacggccggacctaactgaccgcccagcgctatctgccagcataatgtaaagacggcgacaggcggcataaatcgtatggcatagcgcgtcatacgaatgacgcggttttcgacgaaaacgggcgccagccgtttttccatcggccacgtcttcgcgtagtgctgcccccggcgaaataagctaaaaaaatttacggagcgattatccggtgtcgacatggcctacctcaacttcacatataaaatttaaaaaatttgtgcaaaacaacaactgcgagggacaacgttcaaaacattttgtcttcgatacccactatcaggtatcctgtgtcggcctgtcaaaggccggtagtttaaaatcattgagtcgtcaatattacacatagtatgccattggctgaaaaatacgcaaaatggcatagactcaaaggtatttcttccatcatgcccaaaaaaactcctgcgcatgatgttaatcataaatgtcagggctatcatgcgctacgctctatggctcactgacgtttttttagccacgtatcataaataggtacttccatgtcgagtaagttagtactggttctgaactgcggtagttcttcactgaaatttgcaattattgatgcagttaatggtgatgaatacctttctggtttagccgaatgtttccatctgccagaagcacgcatcaaatggaaaatggacggcagtaaacaagaagcggctttaggtgcaggcgccgctcacagtgaagcgctgaactttatcgttaacactattctggcacaaaaaccagaactgtctgcgcagttaactgcaattggtcaccgtatcgtacacggcggcgagaagtataccagctccgtagtcattgatgagtccgtcattcagggcatcaaagattccgcctctttcgcaccgctgcataacccggctcacctgattggtatcgccgaagcgctgaaatctttcccgcagctgaaagataaaaacgttgcagtattcgacaccgccttccatcagaccatgccggaagaatcttacctgtatgccctgccgtacagcctgtataaagaacacggcgttcgtcgctatggcgcacacggcaccagccacttctatgtaactcaggaagcggcaaaaatgctgaacaagccggtagaagaactgaacattatcacctgccacctgggcaacggcggttctgtttccgctatccgtaacggtaaatgcgtggatacctctatgggtctgaccccgctggaaggcctggtcatgggtacccgttccggcgatatcgaccctgcgattatcttccacctgcacgacactctgggcatgagcgtggatcagatcaacaaaatgctgaccaaagagtccggtctgctgggtctgactgaagtgaccagcgactgccgttatgttgaagacaactacgccaccaaagaagacgctaaacgtgcgatggacgtttactgccaccgcctggcgaaatacatcggttcttacaccgctctgatggacggtcgtctggatgcagtcgtgttcaccggcggtatcggtgaaaacgccgcgatggttcgcgagctgtctctgggtaaactgggcgtgctgggctttgaagtcgaccacgaacgtaacctggcggcccgcttcggcaaatctggtttcatcaacaaagaaggtacccgtccggcggtggtgatcccaaccaacgaagaactggttatcgcgcaagacgcgagccgtctgactgcctgatttcacaccgccagcctcgctggcggtgctgttttgtaacccgtccccaaaagacggtaacgaaagaggataaaccgtgtcccgtattattatgctgatccctaccggaaccagcgtcggcctgaccagcgtcagcctcggcgtcatccgtgctatggaacgcaaaggcgttcgtctgagcgtctttaagcctatcgcccagcctcgcgctggcggcgatgcgcctgaccagaccaccactatcgttcgcgcgaactctaccctgccggcggctgaaccgctgaagatgagccacgttgaatctctgctctccagcaaccagaaagacgtgctgatggaagagatcatcgcgaactaccatgcgaataccaaagacgcggaagtggtgctggttgaaggtctggttccgacccgtaaacatcagttcgctcagtctctgaactatgaaatcgcgaaaacgctgaatgcggaaatcgtttttgtcatgtctcagggtaccgacacgccagaacagctgaacgagcgtatcgaactgacgcgcagcagcttcggcggcgcgaaaaacaccaacatcaccggtgttattatcaacaaactgaatgcgccggttgatgaacaaggccgtactcgcccggatctgtcggagatctttgacgactcttccaaagcgcaggtgatcaaaatcgatcctgctaaactgcaggaatccagcccgctgccggttctgggcgcggtgccgtggagcttcgacctgattgcgacccgcgctatcgatatggcgcgtcacctgaacgccaccatcattaacgaaggcgatatcaaaacccgccgcgttaaatccgtcactttctgcgcgcgtagtattccgcatatgctggaacatttccgcgcaggctcgttgttagtgacctccgctgaccgtccggacgtactggtcgcagcttgcctggccgcgatgaacggcgtagaaatcggcgccctgttgctgaccggcggctatgaaatggacgcgcgcatttctaaactgtgcgaacgcgcattcgccaccggtctgccggtctttatggtgaacaccaacacctggcagacttcgctgagcctgcaaagcttcaatctggaagtcccggttgatgaccatgagcgcatcgagaaagttcaggaatacgtcgcgaactacgttaacgctgagtggatcgagtcgctgaccgccacttccgagcgtagccgtcgtctctctccgccggcgttccgctaccaactgactgagctggcgcgtaaagccggtaaacgcgtagtgctgccggaaggcgacgaaccgcgtaccgtcaaagcggcggcaatctgcgctgaacgcggcatcgccacttgcgtactgctgggcaacccggatgaaatcaaccgcgtcgcggcatctcagggcgttgagctgggcgcaggtattgaaatcgtcgatccggaagtggtgcgtgaaagctatgtcgctcgcctggttgagctgcgtaagagcaaaggcatgaccgaaccggttgcccgcgaacagctggaagacaacgtggtgctcggcacgctgatgctggagcaagacgaagtcgacggcctggtttccggcgcggttcataccaccgccaacaccatccgtccgccgctgcagcttattaaaacggcgccgggtagctccctggtctcttctgtgttctttatgctactgccggaacaggtttacgtttacggcgactgcgcaatcaacccagacccgaccgcagagcagctggcagaaatcgcgattcagtctgcggattccgccattgccttcggcatcgaaccgcgtgtggcaatgctctcctactccaccggcacctctggcgcgggcagcgacgtagagaaagtacgtgaagcgacgcgtctggcgcaggaaaaacgtcctgacctgatgatcgacggtccgttgcagtacgacgccgcggtcatggctgacgtagcgaaatccaaagcgccgaactcgccggttgcgggtcgcgctaccgtgttcattttcccggatctgaacaccggtaacaccacctacaaagcggtacagcgttctgccgacctgatctccatcgggccgatgttgcagggtatgcgcaagccggtgaacgacctgtcccgtggcgcgctggttgacgatatcgtctacaccatcgccctgacggcgatccaggcttctcagcagcagcagtaacagtaaaagctaatgccggatggcggcgtgaacgccttgtccggcctacaggtgagataccgttgtaggccggataagacgcgttagcatcgccatccggcattctgctatttaccctgcaaagcggaattttttgcttaactgcgctgcatcaatgaataactattcccttcttctcatacttagcctctttgctttgcaacagggatagtctgtcatgtctgtcgttacagaatcaaaaacagccagaaaatgggcaatgcccgatacgctggtcatcatcttttttgtcgccattttaaccagtatcgccacctgggtcgtccccgttgggatgtttgatagccaggaagtgcagtatcaggtcgatggtcagacaaaaacccgcaaagtcgtcgacccgcactcttttcgcattgtgaccaacgaggccggggaagcgcagtatcatcgagtacaatttttcactaccggcgatgaaagaccagggctgatgaattttccgtttgaagggttaacatccggatcgaaattcggcactgccgtcggcatcattatgtttatgttggtgattggcggcgcattcggcatcgtgatgcgtaccggcaccgtggataacggcattctggcgcttattcgccacacgcggggcaacgaagtcctgtttattccggtgctatttgtcctcttttcgttagggggcgccgtatttggcatgggcgaagaggcggtcgcctttgcaattatcatagccccgctgatggtcaggctgggctatgacagcattaccaccgtcctggtgacctatatcgccacccaaattggctttgccagttcgtggatgaacccgttttgcgtagtcgtcgcccaggggattgccggcgtgccggtactttccggctccgggctgcgtattgtggtctggattgtcgccacgctgattgggctggtttttacgctggtctacgcctcacgcgtgaaaaagaatccgctgctgtcccgcgtccacgaatccgatcgctatttccgcgaacagcaggatgaagtcgtccagcgccctttcaccttcggtgactggctggtactgctggtcctgaccggcgtaatgatttgggtcgtctggggcgtgattgtccacgcctggtttattccggagatcgccagccagtttttcaccatgggcgtggtgatcggcctcattggcgttatcttccgcctcaacggtatgacggtcaacgtgatggcgtcctcattcaccgaaggggcgagaatgatgatcgcgcccgccttgctggtgggttttgccaaaggcattctgctgctggtcggcaacggcgaagccggggaacccagcgtgctcaatacgttgcttaacagtatcgcgcatggcatcagcgggcttaataatgctatcgccgcctggtttatgctgctcttccaggcggtatttaatttctttgtcacgtccggttcgggtcaggcggcgttaaccatgccattactggcgccgctcggcgatctggtcggtgttaaccgtcaggtgactgttctggccttccagtttggcgatggcttcagccatattatctatccgacatcagcctcgctgatggccacgctgggcgtgtgccgggtcgattttcgcaactggctgaaagtgggggcgtcgctgctgggactactgtttattatgtccagcgtggtcgtcattggcgcgcagatgatgggatatcattgatccaaaataccggatgagcatcagcgccatccggcaatatctccatgattaaagcagtgatttcgcggcttctacaatcgcttcggcggtgagtccgtactctttttgtaagaaatcctgcgttcctacctgcccataacgctctttgacgccaacacggcgcatcggcaccggacagttttccaccagcacttccgccaccgctgaccccagtccattatggatgctgtggttttcacacgtgacgatacgccgcgttttttccgcgtagtttttcaccaacatgcgatcgataggctttaaggtgaacatatcaatgaccgcggcgctcacaccttcctgctccagttggcgcgccgcctccagcgcctccgccaccataatgccgttggcgataagcgtaatatcatcgccctcgcgcagtacgttgcccttgccaatggtaaaggtagagcctggcgcatagatactccgcgcctgcttacggatggtacgcagccagtaaaaaccgtccaggtccattagctggcgtaaaatatccgcgaacatcaccgcatccgtcacctccagtactacggagtgcgccagcccgcgaacaatccccatatcttcaaaagacatatgggtgccgccgttatggcacgctgtcactccggcatcggaggcgatcactttgacgttgttacgctgataatccagcgccataaagagctgatcaaaacagcgacggctggcaaaagcggtaaaggtatgcacaaacggtttacgaccggtcagcgccagccccgccgccgtgccaatcacattcgcctccataataccgcagttaatgacatgctgcgggtagtcacgcgccacgctgtccatcgccattgagctcattaaatcagcctcaagcgcaataattgggcttccggcctcaatctgcccggcgataaaaccggcgtaaactttgcgcatttcgatatcgtctttaagccctgcgggcgcaagcttaatcatgcatgacctccagttgatgaatggcctcattgagcgtctgcttcatgccatccgtcaggcgtaagtggtgagaattcgttaactgctccaggcatggcaccccctgccctttaatgctgtcaaggatcacaacccgtggctgggcatcggcgggcggcacaggctgaaccaccgccagtagtccggcgatatcatcgcctttgacggtgacgacatcgaaaccaaacgcacggaatttcccttccagatcgaatggattgataatctcctccagctcgccgtcaagctgctgtttattccagtcaatgaaaacggtcagattattcaggcggtggtgggcaataaactgaaacgcctcccagcactgcccttcattcagctccccatcgccgacaatgcaaaatacccggttgggtcgccgcgccagtttatgcgacaacgccattccgcccgcaatagagatgccctgtcccagtgagccggtcgtggcgtccacgccgcgcgtttttagccgatccggatggctgggaagacgggtgccgttctggttaagcgtattcagctcttcgcgcgggaaatagcctttaatcgccagggtactgtacaacgcggggcccgcatggcctttcgacagtacgaagtaatcgcgttccggccagtccgggtcggcagggtcgattttcatcaccgcgccgtacagaaccgccagagtctccactaccgacatgctgccgccatagtgaccaaagccaagatggtttaaggatttgagcgtggcgacgcgaatatcgcgcgccagttgggtgatttcggttacgttcattctttcgctccgctattttcctgcacttcggcagtcgcttttttgtttttggccaacacgttgtacgccaccagtagcgcgaatagcgccaccaccagccccgtgatagccatcggcgacagataacgcgccaggttgcccagcaaaataccgattacgccaaagtcagcatccgagaacgtggtattggcgaagccgatcgcgccgagaaccggcagtaacagcactggcaggaaagtgattaatagaccattagcaaatgcgccgatcatcgccccgcggcgaccgccggtggcattgccaaagacgcctgcggtcgcgccggtaaagaagtgcggcacaacgcctggcaggattaacacaagcttcatctgtccaagcaggaacagccccaccagcccgccgagaaaactgaacaggaagccaatcagtaccgcgttaggggcatagggatacaccaccgggcagtccagcgccggacgcgcgtttggcaccagtttttctgaaaagccggtaaaggccggaacaatttccgccagaatcagacggacgccttgcagaatgatgaatacgccggcggcgaaggtgattgccatgatgatggcgtacaccagatagttttgcccgccgctaaacgtcgcttcgacatactcacgccctgcgctgactgccatgatcagatagataatcatcatggtcagcgaaatcgagatagaactgtcgcgtaaaaaactgaggtttttcggcaggttcatctcttccgtggagcgggagcctttaccacacaggctgccaatccagccggaaagcacatatcccagggtaccgaagtgaccaaacgcaatgtcatcggtaccggtaatccgcctcatataacgttgagccaaggccgggaagaaggccatcaccagccccaggatcagcgatccggtgaagaccagccctacgccctcaaaccccgccacggtcaggattacgccaatcatacaggccatgtaaaaggtgtgatgcccggtcaaaaagatatatttaagacgcgtaaagcgtgccacgacaatattggccaccataccaaatgccataattaacgccgtggacgcgccatatttttccagcgcgattgagactatcgcttcattattaggaataatgccctgaatattaaaagcgtgttcaaacataccccctagcggatttaatgaacccaccagtacggttgcgccgccgccaagcacaataaaacctaaaatggttttaatcgtgcctttcaccacatcggaaaacgcttttttctgcgccaccagaccaatcagcgcaattaaccctacaagcaccgagggcacttttaaaatatcaacaacaaaattcagcgtttcaaggataaacatatccacctcgccagcaataattattgtttagcgaaccatgcgcgcagctgcgtttccagttcgttgatgtcgatgatgttattgatcaccaccagttggctttccggtacgctggcgctggccgcgatatctttggccattacaaaaagatcggcagccccgggcgtggccgatgaaagatcggagtgttccacctcggcgtcaatattgagtttctttaatacttttttaatgttcatttctaccataaaactactacccaggccggaaccgcaaattgccatgattttcattattgtcaccttttaaaagtagagttggtctgcatcacgcacgggcgtaatgttatttaccgcaagaaaatggaataaaatcagaaacggtcaataatcgttttaatgtcctccaggttttttgcctgatgtaatttttccatatctacatcactggaaaataattccgccagcgccgatatcatttcgatatgactgtgcttatcaggcgccgccagcataataatgatgtcaaccggatcgaattcgtctgcgccaaatgaaacgccgtgctgtagtttcagtaacgataaacctaaccctttcgccccctcttccggcctcgcatgcggcatcgctaaccctggcgctaatacataatatggcccaagcttttggtgctgctgaacaatcgccgtaaggtattccggtgcgataacacctgcgtccagcaggggtttgccgcaaatttccagcgcctgcggccacgtttccacgctctcctgtagcgtgatggttgcgtcagataaccaggttcccagcatgttattcgcccccacggtgtatgaaattatgaacaaactttattcaagccattcgatattagctgcgatcgttatcacaaagatagcgctaccagcgactattactcagaattgtgatagcgctatcaaattaaaatcatggtgtgaaatcacagcaaaaaagcggatttaaggcgtatactgccagtcatgcgaagcaaagaacgacaataaaaaagcatctcaacatgttgtaatgacgcaggaatttgtatgtcgataccccgtaaacggcgcagtaccggtaaagtgactatcgccgatgtagcccaacttgccggtgtaggcacgatgaccgtatcacgagccttacgcacgccggaacaggtctctgataaactccgggaaaaaatcgaagcggcagtgcatgagctgggctatatgcctaatctcgccgccagcgcgctggcgtctgcctcctcgcacaccatcgcaatggtcgtaccgaaccttgcggaagcggggtgttctgaaatgttcgccgggctgcaacaaattttacagcccgcaggctaccagattatgctggcggaatcgcagcatcgcgtggaacaagaggagaagctgctcgaaacgctgctggcctccaacattgccgcagcgattctgcttagcgtcgaacatagcactaccgtgcgccagtggctaaaaaatgcctctatcccggtgatggagatgggcgcgattcgcagcgatcctattgatatgaatatcggtattgataacgttgcggcaatgtatgagctgacggaaatgctgattcagcgcggttatcagaatatcgggctgctatgcgccaatcaggagcagtggatttttcagcaacatctgcacggctggtacaaagcgatgcttcgccaccatatgtcgccaaaccgggtgattaatgccgccttgccgcccaatttttctaccggcgcgtcgcaactgccggagtttttactggcgtggccggagctggacgcgctggtatgcgtatcggatgagctggcctgcggcgcgttatacgagtgccaacgacggcggatcaaagttccggacgatttagcggtggtcgggtttggcgatagcgatgtcagccgggtctgccagccgccgttaaccaccatggccgtaccgcaccgtaagattggcagtgaagccggacgggcgctgttggaaaggttaaatcagggaaactggagcgatcgaaaatccatcgcctccagtttatgtatgcgggaaagctgctaaaacgcttattccgtctcttccggtttctcctggagcgcggcttcgtttttggcgttgcgggtcatccacagcgccagcgctttgagcgaatctggcgtaaactcatcacagcgcgcggtgatctcctccggggtcagccaacacacttcgctgacttcatcttcctgaagcgcgaaaggcccgtgggaaacgcagctaaacagcgcgccccaaacccggcaatgttggtcttcaaagtaaaacagaccgtgttcggcaaacggcacgcctgcaatacccaactcttcttccgcttcgcggcgggcagattccagtagctgctcatcagcctgaaccacgccgcctgcggtagcatctaacataccgggcaaaaaatcttttgtttcggtacgacgctgcaccagaattttacccataccatcatgaacgacgatatacgtcgcacgatgccgtaagcgttgcgcacgcatctgttcccggctggactgtgcaatgacttcattgtcttcattcacaatatccacccattccgtacttgccaaacgacgctgttccaccatcaggaaaccttcttatttctggcgctcttacggcgcatttacgtttgtgaggtaaattacgagttaattgcaacctgcgcaatgatactttgatcattgagtgcgattacgctcaacacattatcatccagaataccgtagcttgccgcatacccgcctttcgggatgctcactgacccaggattaaagtgatacagtccttcctgctgttgcgccaccggcagatgcgtatgaccatagaccaacacatcgccagtatgcagagcgggcagattcgtcggcccgaagaggtgcccatgcgttaaaaatagccgcctctcttgcgtcaatatttgctgccacggcgcagttatcgggaaatgcagcagcatctgatccacttcgctatcgcagttgccgcgcacggcaatgatttgcgtcgccaccgcgttcaggcgttcggcaacctgagcgggcgcatagccttcaggcagcgcatttcgcggcccgtggttaaggacatcgcctaatatcaccagccaacgcgcgccgctttgcgcgaaccgctcaagcacgcgttccgtggcgggtaaagaaccatgaatgtccgatgcgaacatcagtttcatcgctcactcctcgttgtgaaaaacggcgttatgatactggaatatgaatagattttcagcctgaacgcttcgaggaaagcgcaataaaacgctgtacggaagcacgctgccactggaatgtcgcatatgccgccagcgatgccggcacgtcatcgccatgcagcgccagacgattgatcatcaatgccagatcggtatcggcaatgcaccattcaccaaataaattttgcgtcccctgccccaatagcgcttcagccgtcgcaaacagttttgccgcgctggcttttccagcctcgcttagcggcgcttttttcgccccggcaaacactacgtcggtaggccgttcttcgcgaagcggcagtaaatcgctgcgtagccacgcctgaatctgtcgcgcgcgggcgcgtttttgtaaatcgtgcgggtagatacgctcccactgcggcggcgcgaaacgctcctccaggtattccgcaatagcggacgactcgctcagctcaaaattgtcggcctcaagcaccggtacgcgctgcgtcagcgcatatcctcgccagccaggttgcagatgttctccctggtccagatcgcgagttttcagagtaaaggaaagccctttttcttgtaatgccacccaggcggacaagacgtagggagagaaaaagttcgcatccgaccacagcacaataacaggcttactcataatgtcctcttgagggcgtattaggtttcttcccaaaatatagcgtctttcgcctgctgtcacctgatgaaaactcacacacatcaggaggctttctatacttaattcagcccagactctttacgcacatgcaggagccaaaatgattgacctttactacgcccccacgcccaacgggcataaaataacgctgtttctggaagaggcggagctggcgtatcgtttgctaaaagtagatatcagcaagggcaatcagtttcgccctgattttttggctatctctcccaataataaaattcctgccatcgtcgatcacgccccggcagacggcggtcaaccgcttagtctttttgaatccggcgaaattcttctctacctggcggaaaaaagcggcaaactgcttagcggggagctgcgtgaacgccataccacgctgcaatggctgttctggcaggtcggcgggttagggccgatgctgggccagaatcatcactttaaccactttgcgccgcaggccatcccctatgcaattgaacgctatcaggttgaaacgcaacgcttatacaacgtcctgaataaacgcctggaaacctccccgtggctgggcggcgaccactacagtattgcggatatcgccagttggccgtgggttaacgcacatcagcgtcagcgaatcgatcttgatacctacccggcggtgtataactggtttgaacgcattcgcacgcgtcctgcgacagcgcgcgcactgttacaagcgcaactgcactgtaacagtacgaaagcgtaacgcggtagcatacatcatgtatgatgtagaggtgtatacacggaaaaaacctgcgtccggcacccttattcgtattaaaaacctgacattagggaagaggaaatcctccctactctggaggtcatatgcagattctgattaccggcggtacaggcctgatagggcgtcatctcattccccggctgttaacactggggcatcaggtgacggtcgttacgcgcaatcccgataacgcgcgtcagattctcgattccagagtgacattatggaaagggctggcggaacgtgagcacctcaatgagattgatgccatcatcaatctggcgggcgaaccgattgccgacaagcgctggacgtcgcaacaaaaagaacggttgtgccaaagccgctgggctatcacgcaaaagttggtggatttaattcatgccagcgcaacgccgccctcggtgttgatatccggctccgccacgggctattacggcgatctgggtgacgttgtcgtcactgaagatgagccgccgcacaacgaatttacgcataaactttgcgcccgctgggaacagattgcctgtcgtgcgcagagcgaccagacccgcgtctgcctgctgcgtaccggcgttgtcctggcgccgcaaggcgggattctggggaaaatggttccgccgtttcgcctcgggctcggcggtccggtgggtaatggtcggcaatatctggcctggattcacatcgacgatatggtcaacggcattctgtggctgctggataacgatcttcgcggtcccttcaatatggtctcgccgtatcccgtccataatgagcattttgctcatgcgctgggtcgcgcgctgcgccgtccggcgattattcgcattccggcgacggcaattcgcttattgatgggagagtcgtcagtgctggtgttgggcggacagcgggcgctgccaaaacggcttgaagccgccggattcgcatttcgctggtatgatttagaagaggcgctggcggatgtgattcgctagttcccaaagcgccgtatcctgcccggtgagcgatgcgccgccgggcttcttttatttcagcgagcctttcaggaattgctgtaaacgcgggctttgcggattgccgaacacctgctccggatcaccctcttcttcaattttcccctgatgcagaaaaataacgtgcgaagagacatggcgagcgaagcccatttcatgcgtgaccaccaccatcgttttgccttcttccgccagttgttgcatgatgcgcaacacttcgccgaccagttcaggatcgagcgccgatgtgggttcatcgaacagtaaaacgtcaggttccatcgccagcgcgcgcgcaatagaaacgcgctgctgttggccgccggagagatggacgggatatttgccctgagcgcgctcatcaatccccaccttcgccagatatttcaacgcccgctcgcgcgcgtcgtgcttgcttaatcccagtacctgaatcggcgcttccatcacattttccagcaccgtcatgtggctccagaggttgaagtgctgaaacaccatcgtcaggcgggtacgcaacaagcgtagctgatttttatccgccactttgagctgcccatctttgtcgcgcaccagattaatgttctgaccgttcacgataatcgcgccttcgctcggtttttcgaggaagttaatacagcgcaaaaaagtgcttttaccggagccggacgagccgatgatgctaatcacatctccggcgcgggcctgcagcgatacccctttcagcacttcatgaccgccgtagcgtttgtgcaaatcgataacgtgtaatttattttctgacatcatgttactcgaattatttagaggacacgtgctgcaaccagcgtctttccgcccgacggaacaggcttatcaggacatacgaaatgagtaaatacaacacggcggcaatgccaaacgcggtaaacggctggtaagtcgctgagttaatatcgcgggcgattttcaacaaatccggcaccgtcgcggtaaacgccagcgccgtagagtgcagcattaaaatcacttcgttgctgtaggcaggcaaggcgatgcgtaatgccgacggcaaaataatgcagcgatacattttaaatgacgagaagccataggcccgtgccgcttcaatttcaccgtgcggtaccgagcgaatcgccccggcgaaaatttccgtggtgtacgcgcaggtattcagcgtcagcgccagtacggtacagtttagtccgctgcggaaaaacgcgttaagaagatcggtgcctttgactatctccagcgtatacatccccgaatagaacaccagtagctgtacgtacagcggcgtgccgcgaaaaatatacgtaaacagccagatgggaaaacggatgaatttattactggaaacgcggcctaccgccagaatcaccgccagaagaccgcccatcaccaccgatgaaattaacagccacagcgtaatcgccacgccggtaaaacgatagccatccgtccaaagcagggatttccagtactcctgaatgatctcaatcacaaatcggccctcttcacgcccacggaatagcgacgctcaagtaagagcagcacaccattggaaacggtggtaaataccaggtagataagtccacagaccacggcaaaatagaaaggctcccaggtacttttaccggcaagctgcgtggctttgacgacatcttccaggcccagcagcgacaccagcgccgtcgctttgagtatcacctgccagttattgccgatccccggcagggcgtaacgcatcatcgccgggaacataatccgccggaaggtttgcccgtgggtaaaaccaaaggccgtcgccgcctcgatatggcctttcggcaccgccataaacgcgccgcgaaaggtttcggtaaaataggcgccgtagatgaaaccaagggtgataataccggccaccatcggatcaatatctatctggtcgatacccagcgaatcggtcaccacgttaagcgcgatttgcaatccgtaaaatatcagcagcattaagaccagatccggcaccccgcgaatcagggtggtgtacccttcaaaaataagccccgttacccggttttgcgaaagcttcgcccccgcgccgacgagaccgataagcacggccagcaccacggaactgagcgccagttccagcgtgacgatcgcgccctgtaaaattacgcctgaaaacccgtacaacatgcagcctgtcctgttgtgtgtggtgaagtaataagcctcttttgcatttttgcctcacatcacgccggatggcggctgtgccttgcccggcctacgatgctccccgtaggcctgacacgcacagcgccatcaggcaatgcagacagtcaacattctttgggctttatctgcaccgacggtgattaaccgccataaacatcaaaatcaaagtactttttcgccagcttttcgtaagtaccgtcagcacgcatttcagcaaaggctttgttcagcgcttcgcgcagctcgttatcctctttgcgcagccccataccggttcctacgccgaataacttctcatctttcaccgccgggccgccgaatttatagtcttttccgacgggctgtttaaggaaaccttcgctggccgcgacctcgtcctggaacgccgcatcaatacggccagccgtcaggtcggaataaatgttgtcctgcccctggtaagagacgatctcaatccctttcggcgcccagtgctcattgccgaaggtctcctgcgtcgtcccctgtagcacgccgacgcgcttgcctttcagcgacgcgacggtcggctgaatatcagagttcttcgccaccaccagacgggaatcagcggcgtaaagcttgtcggtaaacgcgatttcctgctggcgcttttcagtgatggacagcgaggacatgatggcatcaattttcttcgcttttaaagacggaatcagcgcatccagcgggttttccacgaacgtacactgtgtgttgatacgtttgcacagctctttggccagatcgatatcaaagccgaccaattcaccttgtgcatttttggattcaaacggtgcgtatgtaggatcggtaccgatgcgaatcttttgtggaatagcggcaaatgctgcggtagcgctggaaaatgccagcaccagagaaagggataacgccagttttttcataactatcctcaacagactgtctttccaggagatctttacagatccgatgcgactatcgtgccattaatcaggccgacaaggcaaagcattctaccttgtcagccggtttattttgcataaaaatcgattaagtatgcatttatgcgcctgttccgcaacggcttatgcaccaaaaaggggcaaaacatctattttgcaccgtgatagttccccagcgcggcgcgttatccccttccctcaatcgccgtaaacattaaaatcgaagtactttttggccattttgtcgtaagttccgtcctggcgcagttcggtcagcgctttatcaaacgcggcttttagctcggtatcatctttacgcagcccaacccccgtcccgtcgccaaaatattttttatccttcacggaaggaccggcaaacgcatactctttgcccgctggctgcttcaggaaaccttcgctggcggcgacttcatcctgtaatgcggcatccagacgaccggcggttaaatcggaatagataagatcctggttggcataagccaccacatccacacctttagtgcgccagttatcattggcgtaagcctcttgcgtggacccttgcagcacgccgacatgcttgcctttcagcgattccagcgtcggctgaatgggagacccttttgccgcaatcaggcgtgaatccgccgcgtaaagtttgtcggaaaacgcaatttcttgctggcgtttatcggtgatagagagcgatgaaataatggcatcaatttttttcgcttttagtgagggaataagcgcatcaaagtcgctggcgacccaggtacatttcacctgcatacgcttacacatttcattaccgagatcgatatcaaagccaataaactcgcctttggcatcttttgatgagaaaggcgcgtaggtggtatctgttccaatacgaaccgtttgcgggagcgcggcgtaactggccgccgtcgcgcccagacctatcagcaaagacaaagcgagaacggtcttcttcatacatacccctcaagtggcgtcattttcttatgttttacgtggcgttgtgtgtttgcagactttttcatgcaggtcttatgccattttcacgtcagcaaaacgattcgacgttaaatttgttaataaaacgttgcaatattgtcctgatgttgaagatagcaggtatgacggttgaaccgcagcgtttcggcggcttttaacgaattaaatgttgaggatatgatcgcggttacaaaattgccctgaaacagggcaacagggacaataatgcacgctaaacagacaacgctatgcgccctgccagcgaacaaaaagatcgtgcggaagggggatatcaaactgatccagcactcggttaaccgtttgatttataacatcatctaacgtctgaggaagatgataaaaagccggaaccggcggcataatcaccgcgcctatctcagcggcctgggtcattaaacgcaaatgcccgatatgcagcggcgtttcgcgcacacacagcaccagaggtcgccgctcttttaatatcacatccgccgcgcgggtaagcagtccgtcagtataactgtggacaatccccgacagcgttttaatcgaacagggcaagataaccattcccgccgtcgggtaagagcccgaggaaatgctggcggcaatgtcgcgcgcatcgtgcgtcacatcggccagcgcctgcacctcgcgcagcgaaaaatgggtctccagcgccagcgtttgccgggccgcctggctcatcaccagatgcgtttccacgctatcgacatcgcgcaaaatttgtaataagcgcacgccataaatcgctccgctggcgccgctaattcctacaatgagtcgtttcatgttctcttaccgtttacgagcgccgttcatcccactgtgttacgtaatcggctcaaagtgggtctgaagagataccatgacaaaagaatccctatcataaaagccagctcaaccaacattatcactaccccctgctcactaaaccaggtgccgaccataatggcaaaattggtgataatgacaaatcgggccgtccaggggaaaagcggcgatcgatagcgtagcaaatcgctggcgtacgttccattacgcaccgattgtcggaagcgatactggcaccatccgatggttatccatgccaggcaacccacctgcccggtactggcgatcagatataaataaaattgctgtgcgggaatatagcgggtcagcaacgacactaacgccaacaaggccgtgattaaaatagcatacaccggcacgccgccgccgttcgttttaccaaagcaggctggcgcaaagcgatcgcccgccatagaccacagcatacgcgaactggcgtaaatggccgagttagcggcagaaaccgcggcggaaaagatcaccagcgtcatcagcgtatccgcccccggaatgcccgcgtgggagaatacccatacaaagggactttgtccatttggcgtcagttcatgcggatagaccagcgccagcaccgcaatcgccaggccgtaaaacaaaatgattctgagaccgatccccaggatcactttcggtaaaataatgtgcggcgattcggtctcccctgccgcatttcctaccagttccaccccctggaaggagtaaatcacgatcgtcatatagaccacaatttgctcccaaccgtggggaaaccacattccgtctgtttttaacgtcgggtgccagtcactatggcccattagcgagtagatcataaccccgcccgcgcaaataaacagcacgatcgcgaaaaccttaatggccgaaagccagtattcgcattcgccaaaactttttgcggaggtgagattgatggccgtcaggatgagcagaatcgccaggcagaacatatataccggaaccgcggggaaaaactggtgagcaataaaccctgcggcagtgaggtcggccgccagggaaaagacccagctaaaccagtaaagccagccaatggtatagctccagcaaggtgacggcataaacatcagcgcgtaatgttgaaatgaaccggagtgaggaaaggcgcatgataattcgccaagacacatcatcgtcgccagcataatggttccggcaaacagataggccagtaaggttcccgccggcccgacgctgcttaacggttcggcaatgccgataaataagccggtgccaatcgtgccgcccagcgacatcatcagcaggtgccgcttcttcaggttacgccgcagaccgccttcaggctctgctggcggagattgttgcagggtatccatcgttactccctgtctttcgtgaggtcaaagatgccgccgcgacatagccgcggcggttatgcgttaacgcgtaaacctccaggcgacgcctttggtctggcaggccattaacaggcccgtataatccagctcaaagcgaaccacatcgcctacttttagcgactgacgacaatcttcaatatccaccagcgtatgatcgctggtttgtcctaagatagtgatagcgtcgtcgcatggcacacagttatccgacggcacatcctggcgaccaaacgccagcaatgcgcgtcggcgtatgccacgatcgacaaaggttttactttgcaaaaaggcatcgacgcccagctccccgaccgggacggtaggtttactgttcagttcgatgatttccgcttccaggatatacatatcggaacaggctttatcgaccggttttgcggagtggtgaaattcattcaggtatttcatgtccacatattcaatgccgaattcatgcagtccgccgatgcgcagatgattcagtccctgcggccagatacctttatccagcaggtgatagctggtgcagtttcccgcagaaagccgccggacaggaataccgctgtcagcttccagccgggcggccagcgccagaaaatcctcgccattttttaccgttggcaacacggtgccgtaacaattaaagttggtgcccagtccatataattccagaccgggcagaccagtaatcagagtcacggtctcaagaatgcgttgatattcaccaaaccagataccctcgcgtaaatcgcccatatccaccatcagtaatacctgatgcgttttcccctggcgttgggcttcttgcgataatgcccgtaataccaccggctcgctatttaaactaatatccgcgtagcgcaccacatcttcgatttcactcagacacggactgcgtaacaggcaggtcgtacatcctgtctcgcgtatttttttcaaattataggttcgtgattcagcgataacggtaattccgccgttgaacaccgcctgcgcggtttccacgcagccgtcaaaaactttattgacagccatcacgtcaataccgctacttgccagcagagctttttccgtgcgggcgttttcttccagcttgcgtagatttatttccagaactggcatatacattttattttcctcccgccatgcttaaacgggcattacgtttctgcgcccgatggtaaatgtactccgcgacgacaaccgccagcacggctccgccaataattttcccggcgtactggaaatatccgcccatatcaatttgagaaggcggaataaataacagcgcaacggcaaaggcgatagaaagaaagcccagcgcgggtaaaatagccggtaaaaccttgcccggaattttaaaacttcttggcgtatccggctgagtcttacgtaaacgccagaacgctgggaacatcaccaggtaaggaataaaataggtgatggtcgttagcgccgttaacatccagtaagccgccgcaacgcttggcgaaataaaagtcgaaaaacacaggaccgtgacaataatcgcctgtacagtcaaggcaaaggcgggcgttttccacaccggatgtaatttgccgattcggtcccccagcagattatcttcacgcgaggcttcctggagcatataaatcggccccaccagccaggagttaatctgcccgagagcgccaaaaaacatacagatggccataacaggaattaaccacggcatatgcagcgtatccgcagcagcatgcatagcctgcatgacgcctgccacgatgtcggttttcccggcgggtaaaagcgtatttagcgcccaggtgccgaccatatagatcccgacgataacggcggcggagacggccatcgctcgcggaaaatcacgctgtggattacgggtacgcccggcaatcatcggggcgacctccagtccggcaaacgcaaacatcatgctggataagaaaacgatcgtatcccagtgtccgagatccggaatccagtttttcgctgtagtgtagtccgtctgcatctggtgtccggtacatagccatactaccgccagcaaaatgaggatggcggagggaataaatacgccgcaccaggcgctgatgctattaataatttttgtccattccatcccgcggatattcatcagcgttaatagccagaaaattaccgcggaaccaataccgataaacgctttattttccgccaggccgccgccgatcatatagcccaacgcggtaaagccgaattgcagcattaatgggaaaaacagtacgcaggaaaagagaaaacaaaccacgacaatccatgcaatacgtttaccaaatgcctctttaatccagacaaatatcccgccatctttcggccagccggttgacagctcgccgcataccatcgctaaaggaaaaaacaagcagaatgcggcgatcacccataacaacatggccgatgccccgtaaggcgccacgttagggatttgccgcaaactcagaatagcgatgacattcataaagacaatgtctttgatgccaagtaagccagaattcgtgttactcatggccatctcctgttatgcattcaggcatcactgccctcttcttatcatctgacgacgggcttcagcatgaaactgaagcccaaaacagtattaataaatgtcgtacttgaccatatcttcgtaactgtcttcccgacgaatcagacgcgtgtcaccatttttatcgatcatcaccacgcccgtgcgcggacggttgttataaacggtttgactttcaatggtgtatgccccggcatcaagaaatgcgacaatatcgccaacatgagtctccttcggcagtaaaaactcttcgcctttcactcccatgtggaaataatctccgccatcacacagcggcccggctaattttatccaggcgtcgtgcgctgccgtcatgcgagaggcgttatagacataaaagaaccagtcaaaatgctggctgtcagagagtacgctgtaaccagcgtcgacaaatttccattcaacgtggcattccacattgccgttaagatcgtaatttgttttacgtttttcgcaggagacttccgtaagtaaaaccgccgccgacccggtcactttacgtcccggttcaatacatatttccacatcggtacgccatttatgcacttcgcgaatgaccgcatcggcaaaatcctgggcggtaataccggcatacatattatcttttaacgggtcgccattctcgtcgtcatatttatagggaaccggaattccgccgcccacgttgatcaaatcaaatttaataccaagcacctcttccaggcgacgggattcatccaccagcactttagtcgcttttgcgaaaggctctgactccggcacctgatcgcccacatgcatatgcaagccgcgcaaatgcacataaggcatcgccagaatgcggcggcaggtttcttccgcctgttccaggtcgagacccgacttcgcatggaaagcggtaaccagttccgcatgcgtcgccgagggaacattcggttctacgcggacgcaaacattggcgactttcttcagcttgcgagagatggcatcaatatgttccagctcatacaggctatcaacattaataagatacagatcgttggcgatggcatattccagatcggcaggctttttcaccacgccgttgaagacgatctgatcgccgcgaaagcctatctccaggcacttgcgaacctcatattgtgagtttgcctccgcgcaaattccggcgtcacgaatggctttcaacacccccatgaccgagcaggtttttgacgcaaagaaggttttggtatttttatgcgccgcaaatgcctgctggatttcatgaatgttacgaataatctccggctcagaaaacacatagaacggcgtggggtactggcgcgccagagcgtccagatcgaccccttcaaaacacaaatgaccgtctttgtgctggaaacggcgatcgccgttgattacctgctcacgtagctggttgtaattctgcataatcgagtcagtcataacgccctctgcttaatgtttatggtaaaaatccgcattctttacagggataaagcaaaaggcatgccactattttttatcaaaataatcaattagttataaaaataagctttttctcattttcgtcattgagtttgctattcatcacaacgacgaaaattcgtcacttttataatgacaacatgaacaatagatatgaggaatgcatatatggcatccaccaatcaggagctggcctcggcgctcaggatgttttcccgctttttcgatttgattcatcagccgttggccgtcattaatgagcgtggtgaatacgtttactacaatcaggaaagcgcggatctggacggctatagtattgaacgggtaatgggaaaacatatgctggatgtctatccgggcatgaaagagacgcaaagtacgatgctttcatcgttaaaaaaaggcgtggaatacattggccattatcaaatttattacaatgcgcgaggccaggccgttgactatcagcacaccaccgcgccgctctatgcaagcgatggcggcatggtcggcgttatcgaaatcggcaggaatatgtccggcgtcaggcggctccaggagcaggtggtagaactgaaccaactgctgtatgccgatcaccatgagaagcaccatgccattattaccgaaaatccggaaatgctcagtaatatcgccaaagccaaacggctggccgccagtaatattccggtgacgattgtcggggagacgggaacgggtaaggagctattttcccgcctgatacatcaatgcagcaagcgggcgaataagccatttatcgccctgaactgcggcgctctaccgcctacgcttatcgaaagtacgcttttcggcaccgtgcgcggcgcctataccggcgcggaaaatagccagggctatctggaactggcaaacgggggaacgctctttcttgatgagctgaacgccatgccgatagagatgcaaagtaagctgctgcgattcttgcaggataaaaccttctggcggctcggcggacaacagcaactccactctgatgtcaggatcgttgccgccatgaacgaagcgcccgtcaaattaattcaacaagaacgtctgcgggcagatcttttttatcggttgagcgtcggaatgttgacgttaccgccgctgcgcgcccgcccggaagatattcccttactggcgaattattttattgataaataccgtaatgacgtgccgcaggacattcacggattaagcgagacggcgcgtgctgatctgctcaatcacgcctggccgggtaatgtcaggatgctggaaaacgcgattgtacgcagcatgatcatgcaggaaaaagatgggctgctcaaacacatcatttttgaacaggacgagttaaatttaggcgtaccggaaaccgcgccggaaaatccccttccctcgtcacccgatccgcagtatgaagggtcgctggaggtacgggttgccaactacgaaaggcatttaatagaaaccgcgctggatacgcatcaggggaatattgccgccgcggcccgcagccttaacgtatcccgcaccacgttacagtacaaagtacaaaaatacgctattcgcttcggcgtggtgcgtaattgacatcggccagcggcattgcgccgctggcaaagccattagccttcgttatgcatttccaggttttccatttcgttctggaacagcaccgctttggcgtcgtcattacgtaatgaatccaggaagtcgaggtattgctggtctacgtctttggtgacatatatcccgttaaataccgaacactcaaactgctggatatccggattttccgcgcgtacggcttcgatcagatcgttcagatcctggaagataagcccgtctgcgccgatgatctgacgaatctcatccacctcgcgaccatgcgcgatcagctcattggcggtcggcatatcaatgccatagacgttggggaaacgaatttccggcgcggcggacgccagataaaccttcttcgcgccggcttcccgggccatctcgatgatctgctctgatgtggtgccacgcacgatggaatcatccaccagcaggacgttcttatcgcggaattccgcgcgattagcattgagcttacggcgcacggatttacggcgtagctgttggcccggcatgataaaggtacgtcccacgtaacgatttttgacaaatccctggcggtacggcttgccgagaatacgggcaatttccagtgcgatatcgcaggaggtttccgggatagggatcacgacgtcgatgtccagatcttcccattcacgagcgattttttcgccaagtttggtgcccatattcacacgagcgctgtagacggagatcttgtcgataaaggagtccgggcgagcaaaataaacgtactcaaacagacaggggttactgaccgggttatccgcgcactggcgcgtgaacagttgccccttttcggtaatatagatagcttcgcccggcgcgacatcgcgcagaaactcaaagcccagcgtatccagcgccacgctttcagaagcgaccatatactccgtacgaccatcgccaacgtcacgcttgcccagcactaacgggcgaatgccgtgcggatcgcgaaaagccaccatgccgtggccgataatcatcgccacgcaggcataggcgccacggatttgacggttagtcgcggcaatcgcggcaaaaatattgtcggcttccagcggatagtgacggaagttgtcgagctcgctggcgaaaatattgagcaggatttcggaatcggaggtggtgttgatatgacggcgcttttcttcaaacagctttttacgtagctcgtgcgcattagtcaggttgccattatgggccaacgtgatgccatacggcgagttaacgtaaaaaggttgcgcttccgaagcgctggagctgcctgcggtagggtagcgcacatggccgatccccatgttgccctgcaaacgctgcatgtggcgagcttcaaaaatatcgttcaccagcccgtttgccttacgcaagcggaagcagttattcgcatcaatggtgatgataccggcagcatcctgaccacgatgctggagcactgttaacgcgtcataaatcgactggttgaccggcataacaccggcgataccgacaataccgcacatacgtcattttcctcgttaagccacatctcagaacctgttacgtcctgggcaagaaactcgacgagctttgcagatagtcaaagaaccatctgatgatgaagctgaactgcgggatgagctgcgatttgctccagtcttcgcttttcgacaagccggtaaaggtatcaaggaagaacagaatggcggcgacaatcagcgcgcctcgcagtgcgccgaaacagatccccaacacccggtcagttcccgacaggccggtcttttctactagctgacctatcacaaaattcacgatagcgccgacgataagcgtcgcgataaacagtaccgcgatagcaatcccattacgaaccagttcgtcttcaaagcccgtaaaccagacagacaggtaagtgtagtagtgactggcgacaaagaaagcacaaccccacgtcaccagcgataacgcttcacgaacaaagccgcggatcaggctaaccagacaggaaaaagcaatcaccgcgataatggcgtaatcaatccagaccatagatgtcccacgattttacgccctgtcgtcctgttcggggcgcattctaacagaaaaagaaaacgtttgcgtagggatttccttcccacgcgtaaataaaaatggcgctgaaaaaatattcaacgccatcacactttttatctcttcgggcacgaccagaagagctgccatcggcctgataagcgcaggatacccggttcattccttctgccggatggcggcgtaaacgccttatccagcctacagaacttcggctattaccagatgaacaccgtaggccttaacgctgcgcgctcaggcaaaacgcgccttagttcgggctatatcccatcaccacgccgcttaacccggaaatctgcttgagctcgccaagcgatcctttcatcttatctttcgacgcatccggcccgacgagaatacgggttattttaccctgtaccggcgttgagggggaagtataaacccggaacccggcggaacgaagcttgccgactatctcgttgactttatccgcgtttttcagcgcgcccaactgtacgacataggctttgccggtcggcgcaggtttatcgtcggcgactggttgcggcgcgggcgtcggcgtggaagcggcgacaaccggctgttgcggtttaggctgcggcttcggcttttcaaccggcttcggtttaggcgtctccaccggtatcggatcaagctcgacattgttagacgccatgcgcgacgggtccagcgacggcgctgccgcatctcccgcccgcacctcttcagccgccccttccggcggctgtgtcggcagcgcctgcgttgcggcaggcatcatatccggctcatcgcggtcgccaggcttcggtaccagtggaatcgcagcaaattcatcctgataatgctttttctgtccgtccagcagaccgggaagcacaataacccccagcgcgactaacacaatcgtgccgactaaacgattctgaaacttactcgccaccgattctccccgcgtctatcacttccataacatgtgcgacggtgtggaacgatccgcacaccagcacggtatcttctggctgcgccgcgtcgatagcggcctgccatgcctgcgcgacgctatcatagacattccctttccccagatgttccagaagttgttccgccgtcgcgccgcgcggcccctctaacggagcacaataccagtcgtcaaccacgcttttcaaccaggctaacgtgccggcgatatctttatcatgcagcataccaatcaccgcaagcacgcgcccgcgtttcggcaacattttcagacgacccgtcaggtattccgccgcgtggggattatgggcgacatcaaagataacgcgcggcgactcactcacgatttgaaaacgtcccggcaaggtagcctgcgcaataccgtcgcgaatcgcctgctcgtcaatattcaacctgctggcgcgcagcgcggccagagcggtggcggcattcggctgaggaacctgcggcaacggcagtccggcaagcgtgccgtcgccatcggtaaacgcccagtgggtcgctgtcacctcataacgccagtcaacgccgcgacgccgcaacagcgcgccggtctcctgcgcgacatccgcgatggttgccggcatttccggttcgccgacgatagcgggtttttccgcacgaaaaatcccggctttctcgcggccgatactttcgcgatccggccccagccagtcagtatggtcaagcgcgatgctggtaattaccgctacatcggcatccacaatgttcgtggcgtccaggcgcccgcccaacccgacctccagaatcaccacgtcaaggttagcctgtttaaacagccacaatgccgacaacgtgccatattcaaaataggtcaatgaaatatcgccgcgcgccgcttctatttccgcaaaggatgcggtatgcgcggattccgctaattctttcccctgcacgcgcacgcgctcggtgtaacgtaccagatgaggcgaactatagacgcccacacggtatcccgccgcgattaacaccgactccagcgtgcgacaggtcgtacctttgccgttggttcccgcaacggtaaaaacgaacggcgcaggcttgaggatgtccagacgcgctgccacctggcttacgcgctcaaggcctaaatcgatactcttgctgtgcaggttttccagataagaaagccacgaggccaggggcgacgcagcttgaggtatagatttgtttttcattgtttccgctgcttctttacggtgaaaagcaaaagggcagagcctgcggccctgcccttttcagttatcaggcctcagactcctgatccggcgccggaggcaccaccacgccttcacgcggggcgtccgggttcggcgcgggcagattcatcagcttcgccagaatgctcgccagcttcaggcgcatttccgggcggcggactatcatatcaatagcgcctttttcgatcaggaactcactgcgctggaatcctggcggcagtttttcgcgaacggtctgttcgataacgcgcgggccggcgaagccaatcagagcttttggctcggcgatgttgagatcgcccagcatcgcaaaactggcggaaacgccgcccattgtcggatcggtcaataccgaaatgtagggcagaccacgttcctgcattttagccagcgccgccgaggttttcgccatctgcatcagcgacatcagcgcttcttgcatacgcgcgccgccggaagcagagaaacacactaacggacagttgtcttccagcgcctgttcaacggcgcgaacgaagcgtgcgccaacgacagaccccattgagccgcccatgaacgcgaattcaaacgcggcggcgacaaccggcataccgtgaagcgtccctttcatgaccaccagcgcgtctttctcgccggtttctttctgcgcggacgccagtctgtctttatattttttggagtcgcggaacttgagcacgtcttttggctccagctcgctacccaactccacaagggaaccttcatctaacaggctatgcaggcgattgcgcgccgacatgcgcatatgatggtcacacttaggacagacctcaagattacgttccagctcagcgcggtataaaacctgaccgcagctatcacacttggtccacaccccttcaggaatgctagccttgcgggtgggagtaatgttgcttttaattcgttcaatccagctcattggtgacctttctgcctgaaccttagtcagctttattataaggggcgcataatgccatttttgcccccaacagaccatgaatgttgcacattaaaacataacagcccgaaactttggataaaaaagtggtcgaaccgctgagttactttctattttgcggcacgcgacgcagcgcgcttatgccggacaatctcaatgacgccaggtaatatcgaaaccacgataatccccacaatcagcagcttaaggttatcctgaatcaacggtatcgtaccgaagaaataaccggcgtaggtaaagagcagcacccacagcagcgcgccgatgacgttataggcggcaaaatgccgataggacatgtgccccatccctgccacaaacggcgcaaaggttctgacgatcggcacgaagcgagcgagaatgatagttttaccgccgtgtttttcataaaactggtgggttttatccagataactacggcggaaaattttcgaattcggattactgaacagtttttcgccgaacagtcgaccaatcgtgtaatttaccgcatcgccgacaattgcggcgatcagcattaacgccaccatgacatgcacattgagatcgttggtttccagcgaagccagcgccccggcgacaaacagcagcgagtcgcccggcaggaacggcgtgacgaccaggccggtttcacaaaacagaatcaaaaacaaaatagcgtacacccagacgccgtactccgcgaccagctccgccagatgcacatcgatgtgcagaataaaatcaataataaagtagatcaggtccatatttgtctttgcctttctacccgacacgtttcgggtgtgcgattcggattagtccgccagaaatagcgggcccattggcggttttggaaggtcaaaccggtcagggtaatccaccgcaaccaaatatagcccttccgccttcgccgttgccgccgccagcgttctgtccctggccgctaacagctctgcgatccagctctccggctggttgtgagcgcctacttccagcaggctgccgacaatattcctgaccatatgatgaacaaaggcattcgctttgatatcgaccaccacataagggccgtggcgggtaacgttgatgtgcatcacattacgccacggcgtgcgcgactggcactgcactgcgcgaaacgaggtaaaatcattttcgccaagcagacactgcgccgcgcgatgcatccgctctgcatccagcggctcatagtaatgcgtcacgccttttgctaataccgcaggacgcagtcgatgattgtagatgatatagcgataacggcgagccgtagcgctaaatcgcgcgtgaaaatcatccggtacagttttcacccagcgcacggcaatgtcaccaggcaaattcgcatttacccccagcgtccatgccgcatctttgcgcaatgcggtcgtttcgaaatggacaacctgcccggtgccgtgaacgccggcatcggtacgcccggcgcagaacacgttaataggttcatttgccacctgcgagagcgctttttccagcttttcctgcacgctgcgcacttcattctgacgctgccagccataatacttgctgccgtcgtactcaatacccagcgcaattttatagaccgccgatgattgctgtccggacatcagtacagatactcctgcaccagcttctccgcaattttaacggccatcagcgcgccgccgaaacgcacgttgtccgccactgaccagaactgaatttgttccggcataccgtaatcattatgcacacagccaatagagagctgtggattgccggaagcgtcgcccacctgcgtcgggtaatccgtctcttctgacagtacgatatcttcaccgcgggaaaatgcctcgcgcgcctcttccgccgccagcggacggagcgcttcaaagctcaccatctgcgcatggccatagaacaccggcgactgcacgacactggcggagatcatcacgccatcgtcctgcaaaattttacgcacttcatcgacgatacgacgttcctggcgcacgctgccttcccgatccggcagcagcggcagcatattgaacgccaactggcggccaaagaaatcatcttcatcaatcggtatgccgttaagcaacttcgcactctgtccggccagcgcatcgaccgcttttttcccctgtgcggacgctgataacatactggtgacggcgatgcgcgacagtcccccctgatcgattaacggcttgagcgccgccagcagttgactggtcagactatcggcgaccgcaatcacgttacggttacggtaatccgccagtacatacgggttaacttccggcacgaccagcggcacatcaggctccagcgcgaacagaccgctggaatctatcaccaggcaacctgcattagtcgcgtcgtctatccaggcagccgatgcctctgcgccggcaacgaaaaacgccaactgcgcctgcgtccagtcaaagtccgccgcatcctggacaatgaccgacttgccaccaaaacggaggtgctcgcccgcgctttcatgacgcgccaacgcataaatttcaccgaccgggaactggcgttcagccagtgtttcaagcagggcttcgcctacggcgcccgttgcgcccagaatggcaatgttccagccttcagacatggtgatttactccagaaatacataagcgtccctgtcgcattattcgacagggagcattaagaagacattaatgtgccgggtgatgaacagcgttaaaacctagcttacacagcaaggcggctgccgtttcgtcgtcacacatcacgtataaagacgaccattcacggcgctcaagataatttttacgcaatttatcaaattcacccggaattccagcgactttacgcagtggcgcatcgtcgcggcgcacatcatacaccaaatgcgccagtcttttcagcgtcggttgatccagcgggccatgaagcgtaatacgaccaaactcaggcgcaggcagtaatgtctccagcgcgacacgctgctcgcgaccgataaacgcgctatacgcctcaaagacctgggtggtgccgcgcgctttgccttccagcgtatagccggcaatatgcgacgtgccgatatccacggcttccagtagcgcgacgttaagatccggttcgccctcccacacatcaagcaccacgctcagcggctgcccggcattaagtcgcgccagcaacgcggcgttatccaccaccggaccgcggcaggcgttaatgagaatggcgccgggtttcagtcgacggatcagcgtctcatcggccagatgcagcgttttgtacggtccgtctttatagagcggcgtatggaaagtcaggacatccgcttcctgcaccagctcatccagcgtacgaaaatcaccctcgtccccgcgtgcggcgcgtggcggatcgcacagcaacgtgcggatacccaacgcttcaagcctggtctgtagccggcttccgacgttacccacgccgacaatccctatagtgcgatcgcgtaacgaaaagccgtcacgttcggccagcatcaacagcgcggaaaacacatactccaccacggcgatagcattacagccgggcgcggctgaaaaaccgatgcccgcctgcttcagccatgcctcatccacatgatcggtgcctgccgtagcagtaccaacgaagttaatcggcgtgccgctcagcagcgattcattcactttcgtgaccgaacgcaccattaacgcatcggcatggttcaattcttcaacggggatcgggcgacccggcactgcctttacctcacccaggcggctaaataattcgcgggcgtaaggcatattttcatcaacgagaattttcacgactgtcgtacctgtttgagaacgagagttaaccggacaagtgtgccataatctggccgccaggcatatattgctcagatttatggttaaaggataattaattatgcatcccatctccggcgcccctgcacagcctccaggcgaagggcgtaatcctctttccgctgcgagcgagcagccgctttccatgcaacagcgtacggtactggaaaggctgatcacgcgcctgatttcactgacccagcagcaaagcgcggaagtatgggccggaatgaaacacgatctggggataaaaaatgacgcgccgctactgtcgcgccacttccccgccgctgaacagaatcttacccagcgtctgggcgtagcgcagcaaaatcacgccaatcgtcaggtgctttcacagctaacagagctgcttggcgtcggaaataatcgtcaggccgtcagcgattttatccgtcagcaatacggtcaaaccgcgcttagccagcttacgcccgatcaactcaaaaacgtgctgacgctcctgcaacaggggcagctttccattccgcagccgcagcaacgtccggcaacggatcggccattattgcctgctgaacataatacgttgaatcagttggtgacgaagctggcggccgcgaccggcgagtcaaacaaacttatctggcaatcaatgctggaactctccggcgtgaaaagcggcgagctcattccggcaaaacagtttacccatctggcgacatggctacaggcgcggcagacgctgtcactacaacacgcgcctacgctacatacgctgcaggctgcgttaaaacaaccgctggaaccggacgaactcacagcgatcaaagagtatgcccaacacacttatcaaattcagccgcaaacggtgctgaccaccgcccaggtgcaggatttacttaaccatattttcctgcgtcgcgtagagcgggaggcggatgagctcgaaccgctctctattcaacccatctaccgcccgtttgcgccgatgattgaaaccgtgaaaaatctgtctgcgcgaccaggcctgttgtttatcgcgctaataattgtactggcgcttttctggctggtttcttaaccgcgccggaacgataatatcgtcaccaggatgccaaccaccgcggagatcgctcccgcgaggaatacggaaggatagccgtatgacgtggccagcatgcccgccagcgggccggtaacgccgtaggagatatcctgaaacgcggcgtagccgccgagcgccgtaccgcgtacctgtgcaggtacgcgtttcacaacctccacgcccagcgccgggaaaatcagtgaacaccctgccccggtgagcgccgcgcctaccagcgctatccaggccgtcggcgccagccacaagagcagcaaccctgccgtctcaaccagcaatgagacaacggcgaccttcacgccgccaaagcggtccggcatccaaccgaacaatatgcgcatcagtacaaacgcaccgccaaacgcggtcagggtgaatcccgccatcgtccagccattgctgacaaaataaagtgaaataaacgtaccgatgacggcaaagcccacgccctgcaatgccaggcccaggcccggtttccagataagcccgaccacgctccacagtgaaggtcgctcccccgtatacgcaggcactttacgcacggtgccgttgaatgcccaggccagcagcggtaaaaccatcgtcgtccccgccagcgccgcgaagccaaagtggctatggttcagcaagcccaacggcgcaccggccgccagcgcgccgtaaatcgccatcccgttccacgacatcaccttaccggaacgcgttgggccaaccagccccagtccccaggtcagggttccggtcagcagctggctttcgccaaatccgaggatcaaacgcccgacaataagcagcgcgaattttactggcgcggaaaccggcaacagcgcggccaggagccaggcggcgcccgccagcccgcaggcaagcatcccctgtaacgccgatcgtttagcgccatattgatccgccagccgtccggcatagccgcgcgtcagtaccgtcgcaaaaaactgaatgcccacggcgatcccaaccatcgtattgctatagcccagttcgtgatgaacaaaaagcgggatgacgggtaacggcaggccgaccgtcatataggtcaggaaaaccgcaaaggcgatgcggaacagcgaaaaattcgcagacggggtcgttgttttttggctaactgctgtcatgcattactccagaatgcagagtaaggcggggaaaggccacgcccccctctacctgaacgtcaggattaaggtgcgttggataacgttaaacgcttacgcattatcggaaggataatgtagaaagtgaagtctgcctgtgagacgcgaaacttgtcaaccttgaaattgcagccagggtatcaacgtggcggcgtgtcatcaaacagaaagggaaagaccgctttcatccctctcaccttaaaccgtccggtcacctgcttgcgctgttctggcgtcagtaacctgaacatcatctcccagatatcttcaggctccgcttcctgtaaggaaatgggttccggcgtcggttcctctccgctgtcgtccagataacgatgaacataaagagggaaaacagatatatgaaactcctcggcctttgatttaacacgcttacgcctgacaccctctttcccttcgctgtacttatacaaacgttcgcgaaccgcaggctcgcttcccggaaaccccggtaagccaagacattccttaaccgtgaaccattcctttgccatcggtttctttcctttcccctgatgaaataaaaatatttcttctttttcgcgaaattttgctttctttctggcactattctcagagtgaaaaagaaagtaactttctttttctcgcgctaatttttaccttaaaaatatcggtgccgataacacatcttcttaggattacagaatggaaccaaaaagccaagactggcatcgtgcagatattaaaagtgcacttgaaaaaagaggtattacgctcagagatctttctcgtcaggccggtttatcacctgattcactgcgcaatgtctttacccgttcctggccgagagctgaacggattattgcggacgcgctgggcatcacgccgaaagagatctggccgtcgcgctatgatgatatgcaaataaaaaatgatgccgatatcgcagaataatagttaatgctgaataaattggctttaacctatcaatctcaacaattaataaatatttaaacttattatattgaaaatagtaatagcactatctgtcatgcttcccgaatcaaatactgttaaagcattacgtcattgctattacgtattttattaacaggaatcattatgagttgggataaaagaatggcggttaattatgccaaaacgcatgcaggttctcattctcaaggccggtgtgcggaatttacccgaaaggcaattcaggcgggcggtatcacgctggggcatacatatcatgcgaaagattatggcccaatgttaagaagcgccggattcaccgctattggtacctatgaaatgccgcgcgagggtgacgtcatcattattcaaccttacgctggcggaaacccgagcggtcacatggcgatatacgatggcacagagtggtattcagattttaaacaacgcgatatgtgggccggcccgggctaccgggcagccaggccctcatataccatctacaggaagaattaatgaaaacgttctcccttgtcgcgcttatcctgttgctttgtagttgctctgcgcctcatcacgacagtacgcaggccgtgaagcagttctatacctcatggatgacgacgttcacgaacgatgtgaatacccctgacgacaccaccgccttaatgcaacgttacgttgctaaagaggttattcatcgcctggcgctaatacagtccctttatgaacaggagattgtgggggcagattattttatgtatgcgcaggactatgcgccagagtggattccacagttacgggttgggaaggcacaccctttcctcggcggagaaaaagtggatgttctgttggctacagagtcaacgcccatccacctggaagtttatacccgttgggaagagggacgctggaaaatttaccgcgttcgggatgctgacaggggttatgaacagccgatttatgacgcaggcgccatcacccaggctgaggcctggtcagcgaaagtcgcgccggaatataagaagcattaaaaaagggaaccgccatcggtctcttgttcgtaccggagaggttaaagcgcctcttgcatcaggctcttattccgtcgctgaaaacagtaagccgaaaacaacccaggcattatttaaaatatgaagtattatcggtatcattagcccacggcttctcattcgaacaacgcataatatcgatgaaaaaacaaacagataaacaaaagtcaccgcaaagagatattgtgtatgcataaatgcaaaagcgagtgaagtaataataataccggaagctcttgagtaccgaccccaaccgatactgctgtttaataaaaaccctctgaatataatttcctccgccacaggagccagaaagcacatcgccagcgtgttaagaaatttatgaagaaaaaattgccttgataactcggccatccagggttccgggccactaaaagcattgtagagaacggtaaggcacaccagggccagcgccggaacaaaacactccacgaatgataagcgacccaatgataaaaacgggtaatactttgaataaatactccaggcggcaatcgcatagacaaaaacaatactatatataaaaggcgcagccagacctcccaaataaagccaggcataggaaggcgaaaatgaggcaaaaacaaaaatgccgaacaaaccaaataaaacagccacacaactcaaactatgcctaattttatctaatgtattagttggcatttatataatatccatataatttgttgttccctgaatgaaaaaacaggtcgcattagcgacctgtttcattgttgatactacaacgtaatagtcaggcttacaacttacgcatcaccagcgtggcgttggtgccgccaaaaccgaagctgttagacattacggtagtcagttcacgctcggtcgtttcggtcacgatgttcagacccgcagcctgctcatccagctcttcgatgttgatgctcggcgcgataaaaccgtgctccagcatcagcagagagtagatggcttcctgcacgccagccgcacccagcgagtggccggtcatcgctttggtcgcggagatagccgggctgttatcgccaaacacttcacggattgcaccgagttctttcacgtcgcctaccggagtagaggtaccgtgagagttcaggtagtcgatcggcgtgtctacgccgtgcatcgccatctgcatgcaacgtactgcgccttcaccagacggagcaaccatgtctgcgccatcggatgttgcgccatagccgacgatttccgcatagatatgcgcgccgcgcgccagagcgtgctccagctcttcgacaacaaccataccgccaccgcccgcgatgacaaacccatcacggtgcgcatcataggtacgggacgctttttcaggcgtatcgttatatttggtggacagtgcgcccatcgcgtcgaactcacaggccatttcccagcacagctcttcgccgccgccagcaaaaacgatgtcctgtttgcccagttggatctgttcaaccgcattgccgatacagtgtgcggaggtcgcgcaagcggagctaatggagtagttcacgccataaattttaaacggcgtagcgaggcaggcggaaacgccggatgccattgctttcgtcaccacatacgggcccacggctttcaaaccacgcgggctacgcatggcgtctgcgccaaagacctggaatttcggggagccgccgccggaacctgcaatcaggccgacacgcgggttattctgatagacttccggcgccagaccggcgtcggccactgcctgctccatagacagataagcatagatggaggcgtcgctcataaagcgcacgactttgcggtcaatgaggccagtggtatccagttttacgttgccccatacctggctacgcatgccggcgtccttcagctcctgagagaaagtgatccctgaacgtccttcacgcagagatgccaggacttcctgctggttattaccgatgctggaaacgatgcccaggccagtaatcactgcacgtttcattcaatacctctgtaattcgcactatttttaagtttcgattggcacaatagcgtacacttgtacgccgaacaagtccgatcagccatttagtacggaaatttgcgccatcaggcacacatcgttaagatcgcgataccgcccgtcagacgagtaacttacgtgaaacaatacgccatacaacccgccacactcgaatttaacgctgagggtacacctgtttcccgagattttgatgatgtctatttttctaatgacaatggactcgaagagacacgctacgtttttcttggcggcaatcgtcttgcggagcgatttcccgtacattcacatccattatttatagtcgcggaaagcggttttggcaccggactcaacttcctgacgctgtggcaggcgtttgacagctttcgttctgcgcacccacaggcgacgctgcaaaggttacatttcatcagttttgagaaattcccgttaacgcgcgacgatctggcgctggcgcaccaacactggccggagctcgcgccctgggcagagcagctgcaggcgcaatggccgctgccgctcccggggtgccaccgcctattgctggatcggggccgggtgacactggatttgtggtttggcgatattaatgaattgaccgaccaactggacgccacgctaaatcaaacagtcgacgcctggttcctcgacggttttgccccggcgaaaaatccggatatgtggacgccaaacctgtttaacgcgatggcgcggctggcgcggcccggcgcaacgctggcgacgtttacctcggcgggtttcgtccgtcggggattgcaggaagccggttttaccatgcaaaaacgcaaaggcttcgggcgtaaacgcgagatgctttgtggagtgatggaacaacacctcatgccgaccctttccgcgccctggttttaccgcagtggaagcgaaaaacgtgaaacggcgatcattggcggcggcattgccagcgcgctgttatcactggcgttactgcgtcgcggctggcaggtgacgctctattgcgcagatgatcagcccgcccagggcgcttccggtaatcgacagggcgcgctttatccgctccttagcaaacatgacgccgccattaatcgctttttcccgaccgcattcacctttgcccgtcgcctgtatgatgccctgcccgtctcttttgatcatgactggtgcggcgtaacgcagctcggatgggatgagaaaagccagcagaaaattgcccagatgctgtccctggcgctgcccgccggactggcctcggcgctcaatgccgaagaggcggaacaggcggttggcgtgacgacacgctgcggaggaattacctatccggcaggcggctggctgtgcccggaacaattaactcgcgcagtcatcgcactggcgaccgaacagggtttacaaacgcgctttcgccatacgctcacgtcgctcgttgcgcaggagtcgcgctggcaactgcgctttacgtcaggtgaaaccgccagccatgagaccgtcgttctggcgaacggccatcagattaaccgttttgatcagacccagccgctgccggtgtatgccgtcggggggcaggtcagtcatattcccaccacccccgctctctcggcgttgcgtcaggtgttatgctacgacggctatctgacgccgcaaaatccgcataatcagcagcactgtattggcgccagctatcaccggggtgacgaaagcaccgtctggcgcgaagaagatcagcgtcagaaccgacagcgtctgcttgactgttttccggatgcgaaatgggccacagaggttgacgtcagcggcaacagcgcccgttgcggcgtgcgttgcgccacccgcgaccatctgccgatggtgggcaatgtcccggattaccatgccacgctgacgcattacgccgatttagccgataataaaacgtcggcggcgcctgcgcctgtgtatccgggtttatttatgctcggcgcgctgggatcgcgcggtttgtgctcagcgccattatgcgcagaaattctggcggcgcagatgagtaacgagccgattccactggatgccggtacgctggcggcgttaaatccaaatcggttatgggtgagaaagttattgaagggaaaagcggtgaagtaatgggtcagtcaatagcggaaggcggcaagcgtcgccttccggcccacggcgttattgttttgccttgtcgaacaaattgtcccacatcgctttgactaacgcctgatcgcgcggcgacagttcgccggcgccgatcgctttttccagactttggctaacgttggcatagaccgcctcaacggagtggtcatcaccgctctccagctcggcaatggctaacgtcaggtggccacgcaggtatccactggcaaaaagctcatcgtcgctggcgtgctctaccatatcgtcaattaatgccagaatgcgtgattcaaactccgcgatcatcttctttcctcattgtaaacgtggcgctggctttaattaagcgcttccggccacgggaactgttccgccttaagttcgggcgtgtgatagtaattctgtagcgctttgatgaagcgggccggacgttcaggaatgccctgctccagatacgccattacctgcgcatgaacccggcgctgaaacgccacgcgatccggttcaatatcgccttccagattgtcgcaactgacgttaaagggataccccgccgccacgcaaaacaaccagtcgaaagcctgtggcttcacctcaacgtcttcgaattgactttgggtctgcgcgtcgcgtccgtccgggcagtaccagtaaccaaagtcaaccagttcgcggcgcgccttaccggcgatacaccagtgagaaatctcatgcagcgcgctggcgtaaaacccatgcgcaaagacgatacggtggtacggtacctgcgcgtcagcaggaagatagatcggttcgtcgtcgcctttaatcagacgggtattaaattcttcggcaaagcagccgttaaaaatctcaattaactgttcgtaatggtgcgtattgttcattaattcatccccaaccagtggaggatctcctgtccgtggctatcataaagtaacctggcgctcattaccgccgagacaataacgatcatcggtctgataagcttttggcctttgctcaacaccagacgcgaccccattcgcgcccctaaaaactgaccaaccagcatcacgaagcccgtcgcccagatcactttgccgccgatgataaataacagcaggccgccaacgttggaggtagcgttaagcactttggcatgtgccgtggatttcgccaggttatagccacataaggtgacaaacgccagagcgtaaaacgacccggcggcaggcccgaaaaagccgtcgtaaaacccgacgcatcccccggctatcagcgcgaacggtaatccatacaggcggcgctggcgatcttcctcgcccagcttcggcatcaataaaaaatagaggccgatgaaaatcaccaggatgggcaagatctggcgcaaaatatccgcctgcacgtgctgcaccagcagcgcgccgctcatcgagccaatgaacgtcatcagaatattgagcttttgctcggccaggtttaccactttacggcgaataaaatagagcgaagacgagagggagccgccgcacgcctgtaatttattggtcgccagcgcgtttgccggcgacatcccggcggccatcagcgcagggatagtgagcagccctccgcccccggcgatagaatcgataaatcctgccagtacggcgacaaaaaacagcaccaccagcagcagcggggagaccataaacagatcataaaaattgtccatcagagtacatgctcatccagtagcgcctggcaggaaggcggcagcggcggcggtgtcttcttctcaggctttgtggtgccaggttttggcggttcgaaccagctttgcagttcagcgccgcatccatcgcccggcgggggtaaaggttgatcttcgcactccaggctgtcggcagggcagcgtaaacgcacgtgcatatgcgcgcgatgctggaaccaggggcgtactttacgtagccagtcacgatcgtttccggcatcgaggcaaagctgttgtttaatagccggattgacgaaaatacgggtgacgtcattgtcttgtgctgccagtttgatcagactggcgatatccgacgaccagcgcgacggcacgacatgtttaccgtcgcgggacaccagatctaacgcctgcgggcgcaatagctgcgcctggctccagcgcgttttcggcaactgcaagaaaatatccacatcaagcccggtctgatgactggcgtgtccgccattaaagcggcctccggcaggcatccccatgtcgcctatcaggacggttccgagcccccgttgctgcgcctgatgactcaaccgctggataaacatgaccagatccgggtggccgaaataacggcgctgatcggtgcgcatcacctgataattatcggactgtaccggcaacgtgtcggcgccaatgatgcatccgttggcaaagctaccgatagactgggcggcgccggggacaggatgggttattttctgccacggcgtcgccgccaggctggcgctactgacaaaccatgccagcagcgcaatcgcggtttttttcatttcttaccagcgtggaatctctgtctttacatccgcattctgtgcccgatggcgcagcaggtgatccatcagcacgatcgccagcatggcttctgcgatcggcactgcgcgaatccccacacacggatcgtggcgccctttggtgatcatttcgacttcttcacctgcccggttgatcgtacgtcccggcacggtaatgctggaggtaggtttcagcgccatatgcgccacaatgtgttgcccgctactgatgccaccgaggatgccgccagcgtggttgctctgaaaaccctgcgccgtgatttcatcgcgattctggctgccgcgcagcgccaccacgttaaatccttcgccgatctccacgcctttcaccgcattaatgctcatcagcgcatgggcgatgtccgcatccagtcggtcaaataccggttcgccaagccctgccggcacgccgctcgccatcaccgtcactttcgcgccgatggagtcaccctcttttttcagcgcgcgcatcagttcgtccagcgcgtcaagtttgtccgcatcgggacaaaagaacggattaagctcaacctgacgccagtctttaatctccagcggaatgtcgcccatctgggtcaggcagccgcggatttcgatgccgaacttttccgccaggtatttcttggcgatcgcccctgccgctacgcgcatcgcggtttcacgcgcggaagaacgtccaccgccacggtaatcgcgcaggccgtatttctgctcataggtgtaatccgcgtgtcccggacgaaaaacatctttaatcgcgctgtagtcctgcgagcgctgatcggtgttttcaatcagtaggccaatgctggtgccggtcgtcacgccatcaaacacgccggagagaatttttacctggtccggttcgcggcgctgggtagtatagcgcgaggtgccggggcggcgtctgtcgagatcgtgttgcagatcggcctccgtcaacgggatgccgggcggcacgccatcgacgatacacccaagcgccagcccgtgtgattcgccgaaagtggttacgcgaaagagttgtccaattgtgtttcctgccatcacggctccgttatcgttgttgtcgtttgcgtgttttaatctttataaatattgaaatgttcacgggccgcgagcaactgcgctttggtcaacataaagacgccatcgccgccgttgtcaaactccagccaggtgaacggcacatccggatactgctccatcagatgtaccatgctgtttccgacttcacaaatcagaacgccgtcatcggacagataatccggcgcatttcccaggatacgacgggtcaatttgaggccgtcagtgccggacgccagccccagctcaggttcgtggcgatattcgttcggcagatcggacatatcctccgcatcgacataaggcgggttagtgacaatcagatcgtactgaactttcggcagatcgcggaacagatcggaacggattggcgtcacgtgatggataagaccgtgttcttcaatgttatgctcggcgacagccagcgcatccggcgaaatatcgaccgcatcaacctctgcgtccgggaaagcataagcacaggcgatggcgatgcagccgctgccggtacacatatccagaatatatttcggctgttggctaataaggccagcgaagtggttattaatcagctcgccaatcggtgaacgcggcaccagcacgcgctcatcgacataaaattcgtggccgcagaaccaggctttattggtcaggtaggcgaccgggatacgctcgttaatgcgacgaatcactcgctcgacaatgcggtgtttttcgctggacgtcagccgcgcggtccgcatatcttccggaatatccagcggcagataaagagacggcaacaccagttgtaccgcttcatcccacgggttatcggtaccgtgtccataccagatattcgccgcgctaaagcggcttaccgcccagcgcaacatgtcctgaatggtatgcagttcacttactgcttcatcgacgaaaattttatccacgtattcctccagggcatgctcgcattaaattcggcggctagtttgccacgaagacagggataaatcagcattgacgcggcgggagaatacgaaaaatccgttttgaccgttcggatatcctccgggtcgggtaaactaaggcaaaagatcagacgagacccacgaatgaaaaagaaaacatcgctcagcgaggaggaccaggcgctgttccgtcagctgatggtcggcacccgaaagattaaacaggatactatcgtccatcggccactgcgcaagaaaatcacggaagtccctacccgaaggttaattcaggaacaggcggacgccagccactatttttccgatgagttccagccgctgctcaatacggaagggccggtaaagtatgtccgtgaagatgtcagccatttcgagctaaaaaaaatgcgccgcggcgactattcgccggaactgtttctggatttacacggcttaacgcagcttcaggccaagcaggaactgggggcgctgattgccgcctgccgtcgggaacatattttttgcgcctgcgtcatgcatggacacggtaaacatattctgaaacagcaaacgccgttatggctggcgcagcatccgcatgtgatggcctttcatcaggcgccgaaagagtacggcggcgacgccgcgctgctggtgttgattgaagtggaagagtggcaaccgcccgaattaccctgatgcggaattgccggatggcggcgcaagcgcctgatccagcctacgaacagccagcgctgtcgtaggcctgataagcgaagcgccatcaggcagcaaagattaaatcgctttcgccattttcagattgcagggactcatttgccagttgaatgtccccttgccgctttcatcaagcgtaacgttggcaattgcggacgtcgtgaacatcggcggcgtttcgcccggacaaagctcagataccaggtatccgaccagaggtaagtgagaaatcaccagcaccgatccgatctcttcattggccagcgcctggaggtaggcgctgaccagaccgacatcgccacagggcgttagctccggcaggacatccacctgagccggcagattcatacaatcgccgaccacatctaacgtctgttcggcccgaagaaacggactcaccagaacacgttcgatatccactttttgacctttcagccagttcgccatcaggcgagactcgtcacacccacaaggggtcaagggacgaaccgaatcactggcggcatcgagggctgcgtcgccgtgacgcatgataaaaacttgcatattgcaccgcttttgttaaccagtttcaccaacacgcttaccacatgcccctattggctgcggcaaaaatgcggtggccggcattgtgccttatccattcactgaatgaaacgctgttttttacctcaatggcgtaagtatagtcaatccttgattattatttcgccactaaggaggcattcagtgcggattcatattctctttgacctcaatttccctggtcagtttccccattcgtccagaaatgctccctgcgctccgccatgcgcactaattgttcacaaggcgcgtaacgaggaccgtaaagtgcggccaggcgctgtaatgtcgccaccatttcacccggcccgagagcatccatatagcggaacgggccaccgagaaacggcggaaaaccgataccaaacacggcgccgatatcgccatcgcgcgcgctgcgaatcactttttcgtcgaaacagcgcgccgcttcgttaagcattaacatgacacagcgctctgccacctgctgcgcagacaatcgactctgcccttgcacgccaataagcttataaatagcagggtcaacctgttttttgcttttacgccctttttcgccataaagatagaaaccgcgaccattttttctacctttgcgatcgtcattcaaaattgaagcgacaacatttgcaggcgcgctaaaacgttctccatacgccgcctcaagcacaggaataattttagtgcccgtgtcgattcctacctcatccaaaagttggattggccccaccggaaaaccaaattttaccagggcggcgtcaatatgttcgacgcgttcgccttcagtcagcatccgaatcgcctcattgatatatggcgcaagaattcggttaacataaaacccggctttatcactgacgactatcggggttttaccctgttttttcgccagcttaacggtcgtggcgatggtctgcgcggaagtagacgcatgaggaataacctcaaccagcggcattttttcgaccgggctaaaaaagtgcaatccaatcacctgttccggtctggccgcattcgccgcaatatcgccaatcggcagggaagaagtattggaggcaaaaatggtgtgagcagcgcaattttgctccacttccgccaccatctgttgttttaacggcagatcttcaaacaccgcttcaatgaccagatcacgatgactgaaaccacggtaatcggtcgaacctgatatcaacgccaactgtttatcgcgttcgctggctttgatatggcggcggcgtacttttgtttcaagcagatcccagctgtacttcagagcatgattgatcccctgagtatttatatccttaattcgtactggcaagccgcctttacaggccgtaacccaggcgataccgccgcccattaacccgccgcctaagatgcccacgctgttcagcgggccgggcggcgcatcgctaccgggatcttttttcacctcggtactggcaaagaaaatagcgcgcagcgcctgcgattgaggcgtcatcgccagctcgccgaaagcgcgcgcttccgcgtcatagccgctactgctgccctgcgccagtccagtttcaatcacatcaatgatccgctccgtcgccggataattaccctgcgttttttgcgctgtctttttacgcaccaggcgaaataacagcgcgcgccccagcggccccgccaggatacgttcacggaccggtaatgtccgctgcgccaggcgttcttttttagccagctcgacagccgcttccagtaaaatagtttgcggcaccacatcatcaaccagcccggctttaagcgcctgtctggcgcgaagctgtttacctgtcaggatcatatccagcgcggtactgacccccaccagccgcggaagtcgctgcgttccgcccgatcccggtaaaagccctaactgtacctccggcagtccgagaacggttttaacgtcgtcggtacagatgcgccgatggcaggccagcgccatttcaaggccgccccccagacaggcgccgtgaatggcggcgataaccggaacaggcaacgcctggatctccgccatcagttgctgtccctgacgcgccagcgtttccgcttcctgcgcgttttggcagtgacctatcatgttgatatcagcgccagcaataaagttatctgctttggctgagataaaaacaacgccctgcaacgctttattttcccggatctgcttcaggatggcgcgtacctgcgtggcaaactccgctttcagggtgttcaccttttctccagggacatcaatagcgacaaccgcgacattatccagacgcacgttaagcataaaagctgatgtggtagtcattattccgcctccagaaccatcgccgcgccaagaccgccagccgcgcaggccgtgaccaggccaaaacctccgccccgacgccgtaattcatgcaacgtttgggttatcatccgcgcgcccgttgcggcaaaaggatgcccgtaggcgattgagccgccgagcacgttgaatttagcgtcatccacctcccctgtcgcctgcgcacaaccaagcacctcacgggcaaatcgttcgctgcccagcagttgtaagttcgccagagtctgagcggcaaacgcttcatgcatgtcaaaaagcgtcagatcggccatcgtcaacccggcccgctccagcgccagcggcgttgaccaggccggccccaatagcatgtcctgccagacatcaatagcggtaaaggcgtagctgcgcagataaccaagcgggcgcagccccagctctttagcgcgggattcggtcatcagaataacggcggcagcgccgtcggtcagcggtgtactgttggcggcggttacggagccatgttttcggtcaaaagcgggacgcagtttagcgtagtccgccagcgtggaggcgccgcgaatgttgttgtcttctgcaaaggggtttttatacggcggcacataggtcgtcatcacttcttccgccagtttgccctccgcccatgcctgcgcggcgcgctgatgtgaacgatgcgccagcgcgtcctgctgttcacgcgtaataccatacgttttcgccatctgttcggcggtatcgcccatgcgcagaccggtggaatactcagcaacggcgggaggaacgggcagcaggtcgcgtaagcgcagacgagaaaaaagcgtcagccgttggcgggtcgtccgggctttattgacatcaaccagtacccgcgccagggctttactcacgcctattggcagtaccgacgacgaatctgcgccgccagcgataccggcgcgtatcgtgccggccatcaggctttccgccacattcgctaccgcctgaaaactggtggcgcaggcgcggcttacgctataggcatcggtatgaacattcatccccgtacccagcacaatttcgcgcgcaatattgggggcttccggcatttgtactacctgaccaaaaaccagttgctcaatggcatcggctggaatttcactgcgcgccagcagctcgcctaccaccatcttgccgagatcaacagcgggaataccatgaaatgcagtggcctgacgagcgaagggggttcgtaacccactgacaatagcaatgcgatcgccctggcgggtgaccaacggtaaagcctgacgcatagtactcccctgtaaaaaaataaattagtggtctgacctgatcacagtcttaaccaattttttacatttagccaagcagagagaaaagaaagtgggagctaaggcacagtgaagggaagcgacaaaaaaagaaaacgcctccgccagatgatgacggaggcgtcgtgaatgaacggattaacgcaggccgagctggaagatcagcgtttctgcttcgcaggcgaaaacaaaatcaatatccagacgaacgccttcggattcctcggtaaaggttggcgtaatttggcaaggttcagactccacgctacgcgctttttcggttaacgccgccagcgtctcttcagcctctgcgcgggtagcgaatacgcggctgtatgacgcggtgcaatcggagttgtccatgatggttccaacgtccatacagcagcaaaccggggtttcatcagcactgcatttactcattgtagatttcctctgtatttgcacccagggtgccagataaacgatggggatattttacgctcccggcattcgcctctccagtcgttaatggtgggaaacgcgttaagtgaccgaaatcacacttaaaaatgatctaaaacaaaaatcgcgcgatcgggtgaccgttaagcccgccgattttgccagccagatctcgtttctaagatcacaattgaaaaaacttataaacatacttgcaacattctagctggtcagacctatactctcgccactggtctgatttctaagtcgtaccgcagaccctacacttcgcgctcctgttacagcatgtaacatagtttgtataaaaataatcaatgaggttatggtcatgagccagaaaaccctgtttacaaagtctgctctcgcagtcgcagtggcaatcatctccacccaggcctggtctgcaggctttcagttaaacgaattttcttcctctggccttggccgggcctattcgggtgaaggcgcaatcgcagatgatgcgggtaacgttagccgcaacccggcgttaattaccatgtttgaccgcccgacgttttcagcgggcgcggtttatattgatcctgatgttaatattagcgggacatcgccatctcgtcggacgttagatgcggataacatcgcgccgacggcctgggtgccgaacgtccattttgtcgccccgattaacgaccagtttggctggggggcttctattacctctaactatggtctggcgacagagtttaacgacacatacgccggcggctcggttggcggtacgaccgatcttgaaaccatgaacctgaatttaagcggcgcttatcgcttaaatgaggcctggagcttcggcctcggctttgatgcggtatacgcgcgtgcaaaaatcgaacgttttgcgggcgatttaggccagttggtcgcggcacagaatccggcgctggcgccggtcgcgggtcagattcccagcgacaccaagattgcccacctgaacggtaatcagtggggctttggctggaatgccggtatcctttatgaactggataaaaataaccgctacgcgctgacctaccgctcggaagtcaaaattgactttaaaggcaactacagtagcgatcttcccatcgctataaaccgatttaacctgcctatcccaacggcaaccggcggcgcgacgcagtcaggctacctgacgctgaatctgccggaaatgtgggaagtgtccggttataaccgtgtggcgccacagtgggccatccactatagcctggcctataccagctggagccagttccaggaattgaaggcaaaatcgaccgccggcgatacgctctttgagaagcatgaaggctttaaagacgcttatcgcattgcgttgggtaccacctattactacgatgacaactggacgttccgtaccggtatcgccttcgatgacagcccggtaccagcgcaaaaccgttctatctctattccggaccaggaccgtttctggctgagcgccggtacgacttacgcctttaacaaagatgcgtctgtcgacgttggcgtctcttatatgcatggtcagagcgtgaaaattaatgaaggcccttatcagtttgaatctgaagggaaagcctggctgttcggtactaactttaactacgcgttctaatctctttctgaaacggatcaaaaaggtgagcattgcgctcacctttttatttactgccgtttattccgagtcgatctctttgagttcgtcctgaatcgcctgcgcgttcgggttttcctgcggcttgagttttccgccattggcgataaagtcatgacgctggaagtacgcctcgcgcaccataatataaggatcggaagactggcgcagcaaaccatcggagtccagcaactgcgcgcgggtttctatcccttcgatagtccattttcctatggacattggccaggtcaaccacgagagcaccggatacaaggtatccgccatatccccgccatcttcacgcagcgtgaagctgccgtagaacggaagttgcatataaggcccataccccacgccataatggcccagcgtactgccaaagcgatgcggttcaacgcgctgcagcttaggattcgccattcccgcgacgtcaataaagccgcccatccctaataaggtattcaggaagaaacgggtgaaatgcaccataccctgataaggatcgccctgcaggaaatagttcaccatgatcgccggttcttcgaggttgccggtgaaattacttaaaccgttacgcgcaggctgtggaacataatcacgccaggcgaccgcgaccggccgaacaacatacgggtccagcacattaaagttgaagttgtacatggtgcggttaaacccttcaaatgggtctgaacgcccctgctgttctgtaccggaactcgcacacccgaccagcagtgtggttcccagcgccagcgccgacaggcgaagcttcatagatgtctccctgtgaattatggctatcgctgattgccatccatgacggaacgctaccgtatccgcctgtttaggtgtgagcgattttaacagcacgtcaaacgatgtctatatgcgcgatctcattgctttgagcatagcctggtaacgcaacaacgtgacggccctattctaacgaaacagataaaaacgagcgtgatcatttttattttttcggagaatgccccggcctgggtaaatgaaaaaccgctacgctttattaatatgtgttaatcagcagagatcatcatggatagccttaacgacgataaaattaaccggcacagcagtgacctggaagttgaaagcgaagaaaaacaaagcggtaaagagattgaagtggatgaagatcgtcttccttcccgcgccatggcgattcatgaacatattcgccaggatggtgaaaaagagatggaacgcgatgcgatggctttgctctggtcagctattgccgcaggactttctatgggggcatcactcctggcgaaagggatttttcacgtgcagcttgaaggcgttcccggcggctttttactggaaaatctcggctatacctttggttttatcattgtcatcatggcccgccagcaattatttactgaaaacaccgttaccgccgtattgccggtaatgcaaaatcccactctgagtaacgttggcctgctgatgcgcttatggggcgtagtcttattgggcaaccttattggcaccggggttgcggcgtgggcatttgaatatatgcctatatttgatgaagagacccgcgacgcctttgtcaaaattggtatggaggtcatgaaaaatagcccaacggagatgtttgccaacgcgattatctctggctggatcatcgccacaatggtatggatgtttcctgcagcaggcggggcaaaaattgtggtcattattttgatgacctggcttatcgcgctgggcgataccacccatattgtcgtcggttccgttgaaattttgtatttggttttcaacggcacgctgccctggagcgactttctctggcccttcgcccttcccacacttgccggaaatatctgcggcggcacctttattttcgcattaatgagccacgcgcagatccgcaacgatatgagcaataaacgtaaggaagaagcgaggctacgcggcgagcgcctggaacgggagcggaaaaaagcggaaaaacagcgctgagtggcgacggtttaaccagtcaggcggcgctacacttactccggcgaataaaaaacgctatactggcgccgcgttgtccccttagttaaatggatataacgagcccctcctaagggctagttgcaggttcgattcctgcaggggacaccattgatacccaggacattctcttcttgctgcataacctttcgagcggtttccctttcatgttgcttttattgcccctatgcaatatcaccggacatgccatacgttcagcaaaaagtcgtcatcggccggttatgaccgatgacatcccgatgtggtctagaagcgatactgcaaccccgcggtaaccgtatagttattattagctatacctgcggcatcgccaccaaaatacgccgtatcaccgctggttttatctatgatttgcgtaccgcccttaccttcttcatatttactgtaagcaaactcagcaaagatttttgcattactggtaatataatatccggcgtcaatagaagcgccataatatcgtgaattttccgttttttcacggaaggtaagtttgcgcatgtagtgttcgtcattatcatgcgcatttacccagtcgctgtatttaaacagtacattacactcaaagtcattaatacgataatcacccgccagcccgatatagggcatttcgaaacgctggctataacctatgccgcgcacgccatgaggaaaattaccaatatatcgaccattatcataaatataagacccgcctcttgccgtccagctaaaacgggtttcctgatagcccgctgttacgcccgccttgtagttatcgccctgcaataaccaacctttcacgttcaaatcgtattcattagcatagttgacgctggtgtccggatgaattgaacgatcggtccagcctggctgctcactgctcatccagtcatggtcaaccatatgacccgatcccgacgccaaagacgtccagccgcgggcgtccagcgtcatgaacgaatagggttcccatgataaatccccctgcaacgtggcgacattttttattttccaatccagttgactcagcttccgcccggtgtcagtatcataaaccagctccctggatttaccatttaacacacccacggaaagggatgtcgtgacgctatcaggagagacgtccggaataaataaggcagactccgcataaaccgactcagaaaatacggcgatcatcattactgcaatagcatgttttttcatttctcttgtcctcatattcagatgtaatctggagaggtgatgaagttttcatcttgtcaaatcgtcggacaagagtacatttattacgccagagaacttgacgcatttttaccttatattgaagttaagaaatagaatttgatgctcaggtgaataataagcaatctataatcatgatggaatgatttaccattacggtgatgcgacgttatctggctaacgacatcgttgctgatgttgtcagccagattgaaagtaactgtaatatcagaatttataatgctctttacttagaccatattttttcatgcgcagataaagttttttacggggaatttgcaggtactccgccacttcattaattcgtccctgatgaatatttaatgcttcggtaatgatttgtcgctcatactcttcaacgcgccggtcaagcggggtcggctcctgaagaagcaactgcgggttgaccgtttccgccagcggcagcacgccaacagcaaaaagctctgccgcattagccagttcgcgcacattgcttggccaggcgcgtcgcattattcctttcagtaattcccccgctatttccggcactggatgattgagtcgcaggcaggcttttcgaagataatggcgaaataacggctcgatatcatccggtcgctgagaaagagactggcaggcgatttgggtcatggcgaaacagtagtaaagctcggctgcaatctggttagctgccgcctgctccaccagcgaagcgctgccaacgcccaccaaacgaaaaggccgatgctccaggctttgtaaacgcgccagatggtgctgctgttcgcgtgtcagatattcgggatgactcaacaccagcgtgcctccttgcgcctggtcgatgaatgtctccaactgcccggcattctccggcgtaagttcatagcgtacaaacggccctttcgcgttacgccccagttgatggagataacgggcgccagtcatacgtccagtgccatgctcaccgtaaaaccatacggcaatgtccgtttccgccagttgttgtaaccgttgtcgaaactgattcatccactcgctgcgcccaatcagttcaacctgtaacgtctgctggcaatattgccgccgtgcaatgaccgaccggcgctggcgtagcgcgtcttcaattaatatcaacagcttgcccggatcgacgggtttttgcagaaaatcccaggcgccctttttcaccgcatcaaccgccatcggtacatcgccatgtccggtaatcaataagattggcagttgatcgtcatcctgatgaaacagcgtcatcagatcgataccggaacaccccggcatacacacatcgctcaaaacgatcccctcccaatccgcttttacccactctttggcctcgaaaggatgggtaaagccacgcacgcggtagcctgcctgctcaagcatttgggtataggcgtcaagtacatcaacgtcatcatcaatcagcaaaatagaacattcatcattcaacatcatcgacatccgttaccgagaattgcagcaccacgcaagcgttacgcgtcagcgtcgacgccagacgcaggtcgcccttcatttgcgccatcagcgacacgctaatcgacagcccaatacccaacccgacagctttactggtggtaaacggcttgagtaaagagggcaacagcgccacaggccagccagggccgttatctgcaatataaacctccagcgcctctccctgcgtctgccacgtcaccgcgatcaccgcatcatgcgaacaggcgtcaagcgcattcgccagcacattcaccagaacctgctgaatacgcacttcatcgccgctaacccatacggtgtcggttggcagtgaaagcgctccctgccgggattggtggcgcatggctaataactcccatgccgccacaaaggtttggcgcagatcaacgggatacaatggcgtttccagctccgcccgacgggtaaactgccgcagcgaacggataatggcgtcaatccggttaatgagcccttccgctttggtgagcgtatttctcgcctgtccgctctgaccttgttcaatcgcgcgtcccgccgtaaataaatacattgaaagcgcattcagcggctggttaatttcatgcgccagcgtggtcatggtctggccgactaccgccagtttcgccgtctgaatcaactcatcctgcatggcgcgcaggtcggcttctatctctttgcgctcggcgacctcttgttcaagctgcctgcgttgcatattgagctggcccagcgtatgacgtagcaaacgggctatccgtcctagctcatcgcgcccgtaaaccgggatagtcgagtcggttctccccagccctatctgtaccacagcctgattaagcgcggtaaaacgcttcaccagtcgggaacggataaaatagtggttgagtccccaggccagtagcaacgccaggagcgtcgccactaaaataagcccgccgctaacgcgaacaatctgttccaggcgttgattgaacgtctgcatttgctggtgactactacctaactgcgcctcaagcagcgtgcgaaagcgccctagcgtagcctctctggcgcggctggcgtccagtaaggctttttgcgccgcaacataatcgcgcatggtatcgggcatcttattttttaccatcccgatttccaatagttcgtcgatggtttgccgtagcgtgatcgtactgggccagtcatccagcgcacgaatattctcatccgccgttttttttaggttttccagatagcgaatatgggtctccaccagcatcccgtcattattgccggacttgagctcattcaatctgtcgcgcaggtcgtcaacaatctgattttcaattcgcgccagggtatatacctgctgctgctcgttctgcacctcgcgcgaacgttgcaaatactgcgctgcatcgccctgattcgcctcaatttgatctagcagcgtcccctgctgccaggtaaaatcctgtaccagcgaatttagctccgtggtgaaatcatcatggagccagtcaatgcgagcggaaagctcgctaactttctcccgcaccaaaaacatgttgtagagggcattgtccagctccgccagcaaggtccggctatcctgtaaaatgacggccagttgccggcgctcagcaagctgaagcccctgactgagacgctcaatcttatccagatgctgaataatctgcgtacgtaactgcaaacgtaccgtcgtgttcggcgccagcaaaaattcattgagttgatccacggccagattcaggttcccctcaattaaaaaagcggagtggatgcgaggaaaatattcatcaagcgaatagcgaacctgcgaactttgctcatgccaggaataaaggctgaccatactgacaatcagcgtcagtaatgcgcccgttaaaaatgcgccccgtaaactgttgctgatactgagctgacgaagccgttgcaataatctccccttcatttcagctcttccagtttgtgaatcgccagccgctgattgttcagaaaccagatctgccactccatcattttttgttcggcaaagcttttattatcaaactgcgccagccaggtttcatcttcgctgcttgccgcatccaccgggacgctggtcaataaggctctgatttcaggtaaggggcgtttaagccgcgtttctgcgctgtgcaacgctcgccatgcatctttaagctgcgcgagacgaaaactgatcgcggtatcaaacatgcgttgtaccagttgctgacgcttcaggatcagacgatagttcaacggcggctgggccatcaaacgctgttgttgcgcggcgcgaggattatcggcgctaagcggtgcgacgggatacttaccggtattcgcgtcagccagtatcctttgccctttcggacttaataagtaatgaataaaagcacgcgcttcgtctgcatgacggctgtttttcaacaccgcgacgtaagtgggcgacaccgcagaatacgggaaataggtaaaagcaagattaggatcgttaagtagcaaattagcatagttatcaatgaccggcccggcaacgccaagcccgcttttgattttatccgctacgccgaaactgcgagaggaaatcgtgaccagattacccgagattgccagcagcgttgcccatcctgccgtccagcctttttgctgcaacagcgactccaccatcaaatgattcgtgtctgagcgtgacggactgctcattaatagagcgccctggtaactgggcaggcccatatcctgccagtcggcaggcggcggaagatggcgcgcagcgagcgctgaacggttgatcaatagcccaaatccggataccgctaccgccactgaagttgagcggatagaacgcggcaccagcttctggctggcggcaggcgcgctatccaatagcgccagcttttggtgctcctgaaggtgttgcaacagcatgggggatgacgtcaggatcagatcgacattttccgcattcgccgtatcaagtaattgctctaaagaaccgctggtacggttgagcgtacgaatcatgacggaacccggctccgtctgccagcgctggataatccaggcggtcgcgctgggtgaaaaggtcgttgccatcaccagctcgcggctgtacgcctggcaagaaccgaacattgccgccagccatagcgtaaaagcgcccactctggcgaaacgactacagcatgagaaaagtcgatttgtgatcccgttcataaatatcgatatcacataaagaaaatattgagacaaaacttacccttttatttctgttggcatccagaacaacgttatttgaataataacgggtccgtcgcccgaaaacatcaataaagcgtatcagatcactggcagcaaatttgttaatatccgcacatgctaacgataaaacggccatgccaataattaaagtttcaccacacccttcaggatgggtcaaaaataacctttaaattcacccaattgagtcaattttgacacatttcttcgacttgaattttattgtcactcctttcactctaccgacaaaacctcctgatgttcatctcactataaaatacaggtgactccatgttaacaatattaaaaacagggcaatcggcgcataaagtcccaccggaaaaagtccaggccacatatggtcgatatcgtatacaggcattgttaagtgtatttctgggatatctcgcttactatatagtcagaaacaacttcacattatcgacgccttatttaaaagagcaattggatctcagcgctacgcaaatcggcctgctgagtagctgtatgcttattgcttacggaatcagtaaaggcgtaatgagcagtctggcggataaagccagcccaaaagtcttcatggcgtgcggtctggtactctgcgcgattgttaacgttgggctgggattcagtagcgcattctggatatttgccgctctggtggtcttcaatggcctttttcagggcatgggcgtcggcccctcgtttattactattgcaaactggttccctcgtcgggagcgcggacgcgtaggcgccttctggaatatctcgcataacgttggcggcgggatcgtcgcgcctatcgtcggtgcggcttttgcgatattgggcagcgaacactggcaaagcgccagttatatcgttccggcctgcgtcgccgtcatttttgccttaattgttctggtcttgggaaaaggttcgccgcgcaaagaaggtcttccctccctggaacagatgatgccggaagaaaaagtcgtactgaaaacgaagaatacggcaaaagcgccggaaaatatgagcgcatggcaaatcttctgtacttatgtgctgcgcaataaaaatgcctggtatatttcgctggtggatgtcttcgtctatatggtgcggtttggcatgattagctggttgcctatctatctgttgacagtaaaacacttttcaaaagaacagatgagcgtcgcgtttctctttttcgagtgggcggcgattccctccacgctactggcaggctggctgtcagataaactgtttaagggccgcagaatgccgttagccatgatttgcatggcgctgatttttgtctgtctgatcggatactggaaaagtgaatctttgctgatggtaacgattttcgccgccattgtaggttgtctgatttacgtcccgcagttcctcgcgtccgtacagacaatggagatagtccccagctttgccgtaggttccgccgtcggtttacgtgggttcatgagctatattttcggcgcctcgttgggcaccagcctgtttggtgtaatggtggataaacttggctggtacggcggattttatcttctgatgggcggcatcgtgtgctgcattctattctgttacctctcccatcgcggcgcgctggaactggaacgccagcgccagaatgcgttacataatcaggactcactgcagcttgcggacgcgcaataaacgattagccttcctggggaacagaagcgccgacattgtcggcgctatctattcactggcatcgtatatacccaaaataattcgagttgcttaaaggcggcaagggagtgagtccccaggagcatagataacgatgtgactggggtgagcgacaaatctgccgggagcagatttgaacgtcacgtgcgacggcccgtcagagcgaggcccatcgatgggccgagtaatccgtagccaacacatcagcaacttgaagtatgaagggtatgtactgactaacgcttaccgtatcccaccataaagcgaataattaacccacatgccggtgcgagaaaaagcaataatccgctaacgatgtcatcgccatcctgcaaccatacattgagtaaataaatcagcgcggcaaggataaccattcccgtaaaagaagaaaccgcagaaaaagcccccatcacctgaccgatatagccactcacggcaagtatacttattgcaagaaatgtccataaatagatcatctataatacctcctgtctatggcaaggcttccatatagccttacggtccctctcacttctcctttaagataaaccttatcagcccgtcatttccataacatttatctcacattttatttttttaatcatttttcaatgaccttcgtctgaaataaaattatcactgtaaaaacaatgcattaaaaataatgattagcttatttttgctacgggagaaatatttacgcttcttgataaagaatttctgggcgcgagtaaataactggtggtacattagcctgcctggcgttcatgccctcgtggtttagtactgacttagttttacactccttacgggaaccattgtcgtacatgatggcctaactatacgtaaatcattcaagttaccctgatgagcttactcaagtaagtgcttcggataagcgaacgcaacttgaaggatgatgcgtatttcagagtgtaccgctgcggataatgactcttctgcgatacattattttcgtatctacagaaggtattttatgtttcctcaaagcaaattttcacgcgcgtttttgcacccgcgctactggctgacgtggtttggcgttggcatcctctggttactggtgcagcttccctacccggttttgcgttttctgggcacccgcaccggtaaactggcgcgccccttcctgaagcgacgtgagtcaatcgcccagaaaaatattgaactctgttttccgaccctctcccgggaagaaagggaaaaactgatcgccgagaatttccactctcttggcatggcgctgcttgaaacgggcatggcctggttctggcctgatagccgggttcgcaaatggtttgatgtggacgggctggacaaccttacccgtgcgcaggcgcaaaatcgcggcgtaatggtcgttggcgtgcattttatgtcgctggaattgggaggccgggtaatgggtctctgccagccgatgatggcgacctatcgtccgcataacaatccgctcatggagtgggtgcagacgcgcggtcgtatgcgctcaaataaagcgatgatcggcagaaacaatctgcgcggcattgtgggcgcgctaaaaaaaggggaagccgtttggtttgctcccgaccaggactacggccctaaaggcagctcctttgcgccatttttcgcggttgaaaacgtcgccaccaccaacggcacctatgtactgtccaggctgtctggcgccgccatgttgaccgttacaatggtaaggaaatccgataactcgggttatcgtctgtatattacccctgaaatggaaggttacccggcagatgaaaatcaagccgctgcctatatgaataaaattattgagaaagagatcatgcgcgccccggagcaatatctctggatccatcgccgtttcaagactcgcccgttgggggaagcgtcactctacatctgaaaaaggccgcaaggccttttattttggcatttcgcattgtcataatattcatatcgtaaattactcattcctgcttttagcgataagtctcctgtttacaggcgattttttactgtgtcggcggcgtcgctcaatagcgattcatcactgtcagaaattaaactgtcgccgattcccgacacttgtaagttactaaaagtaaataagaaaatgcctcttgtttcacctcatttttaggcgtacattagcgccgtctggagcgatgacgcgcagaattctgaggtgatgcaggcggtcgaaacacgaataattctcaatttcgtattatccggcatcaactctctataatcaggtaagtgtaagttcatttaggcgtacgacaggtacgcggagagatgaaacgtgaaatatttctttatgggcatttcatttatggtcatcgtttgggccggtactttcgccctgatgatttaaaagtacaatgcaaagaaaaacaggagccatggggctcctgtttgcttttctactccgtgctcgcttcaacgggttttggatgtgacggcagcacgccatcggcgcggaacatcgctttaatccctctgacggcctggcgaatgcggtcgcgattctctattaatgcaaagcgtacatgggtgtcgccataatcaccaaagcctatccctggagaaacgcaaaccttcgcctcattcagcagcttcttggcaaactcaagcgatcccatcgccgcatattgctccgggattttcgcccagacgtacattgaggctttcggcatttcaaccatccagcccgcctcatgcagccccttcaccagcacatcgcgacgacgtttatactgctcggcgatatcgcgcacgcactgctgatcgccttccagagcggcgatagccgccacctgaagcggggtaaaggtgccataatcgtgataacttttaatgcgcgccagcgcgctgaccagggttttattgcccaccataaacccaatacgccagcccgccatattatagcttttcgacaatgtgaaaaattcgaccgccacgtcgcgtgcgccgggcacctgcataatggatggcgctttccagccgtcgtacacgatatcggcatacgccagatcgtgcactaccagcacatcataacgtttagccagagcgaccactttttcaaaaaattccagttcgacgcactgggccgtagggttagatggaaaacccaaaatcatcattttcggtttcggataactttcgcgaatagcgcgctccagctcgttgaagaaatccaccccctcgaccaatggaaccgaacgcacctgcgccccggcgataacggcgccatagatatgaatcgggtaactggggttcggcaccagaaccgtatcgccatgatccagcgtcgccagcattaaatgcgccagtccctctttggaaccgatggtcacaatcgcttcggtttccggatcgatatcgacatcataacgttcctgataccagtgagaaatcgcgcggcgtaaacgcggtatgccgcgagacgtggaataaccgtgcgtatccggacgctgcgcgacggtgcaaagtttttcaacaatgtggggaggggttgcgccatcaggattacccatactgaaatcaataatatcttcaccgcgccgacgcgcagccattttgagttcagcggtgatgttaaaaacatagggcggaaggcgatcgatacgcgtaaagcgacgttcagggcggaagtcagccataatatcctcagattaacgttagcgcccggaccgtccgagcgacgctgccacgatggtggctcctttagaaaatagcctgaaaattttcttcctgtcgagaggctaatgaaaatatttttagcgacaaaaaagaggaacaagcgtaaaaacttactttttaagcgtgtcagttatagcatcaaacaaatcatattattaacaaattgatatcattgaatttacgtaacgtgacgcagccgacgataatttcctgtcaataaaccttatctcaaataatccccttttgattttgtggtttttcctctttaatcaaaagccttactaacgataatggtattcgatcatgtcatattgcggtgtttttcagggatatttccccgaaaatgaggatcctttccggcaagctgccgcgatgaaaccgtaaataaggcagcgaaccggatacgtatagtaaaataaatccctgttttcgcctgactaaccgccatgacgtgatgactcaacgcgctggtgtttgacctttcgctcagcaagagtaaagtgaaataattcagacagttgaagcattcatgcacaggaaaggcaatgaaaaaaaccgcgtgaggcacgcggtttgagactgacaagagaatgtttaattgcctgataacgctgcgcttatcaggcctacagatgacacacttttgtaggccggataaggcgtttatgccaccatctggcttatagaatatgacctaatgtctggcgcagatgcgcgccggaacctaacaagccaggattatcatggacaatcagatagaccggaataccgtgtacataatctttaaagcggcctttatcttcaaagccaccacggaagccggacgctttaaaaaattccaggaagcgcgggacaataccgccagcgatataaacgccgccaaatgtccccatggttaacgccagatcgccgccaaatcgccccatgatgacgcaaaagagcgacaacgcgcggcgacaatcgatacagctatccgccagggcgcgttcggtaatatctttcgggcgcagattttccggcagacggttgtcggacttaacaatcgcccggtaaagattcaccagccccgggccagacagcacgcgctcggcggaaacgtggccaatttcggcgcgcaatatttccagaatcatagcttcttcttcgctattaggcgcaaaatcgacatgcccgccttcgcccggaaggctaatccaacgcttatccacatgcaccagatgcgccacgcccaagccggttcccgcgccatacaccgcaataggtttgccgtctaccggttcgccgccgccgaactgaattaaatgctcttttttcagcatcgggatcgccatcgacacggcggtgaaatcgttgatgatttccagatggctaaagccgagattttttttcatttccgcaatagaaaaagcccaggtatggttagtcatcgctacccagtcaccggtaatcgggcaggctatggcgatacaaccatcttccacgctgacgctatgctcatcgagataaacgcgcaccacggcctcaagactgggataatccaggccggaatacgttttggcctgcgagatttctccactggcgatatcacacagggcaagacgcgcattcgtgccgcctacatctcctactaaagcatactttgtcattcttctactgctccgctaaagtcaaaataagtctttgtcacactgtaaattcatgggggcataacaacaacggccatcaggctgactgcctataaatatagatcttcatcacagaattactttcttgtttcagcaccaattgcagcaatgccgtcgggcaggctgtgcaaaataggtatacgaccccgtgtaaggaagagattatgttccacccgcgtgcccgaacgatgctgctgctgtcgctccccgcgctgattattggcgtagcgtcaagcctggttttaatcgctgcgatgaaagtcgcgtcggtttttcagcaatttctttggcaacgactgcccaccagcatcggcatcgcttatgattcgccgttctggatagtgggtatgctcacgctaaccgggatcgtggtgggtttgattatccgttacagtcccggacacgctggccccgatccggccatcgaaccgttaatcagtatgccggtctcgccatctgcgctacccgggctgcttctcgccttaatcatcggccttgctggtggggtaagtttggggccagagcatccgataatgacaataaatatcgcgctggcggcggctttcggctcccgcctgtttccgcgtatcacggcgttagactggacgattctggcctcagcgggcaccatcggcgcgctgttcggcacgcccgtcgccgcagcgctgattttttcgcaaacacttagcggctctaacgatattcccatgtgggatcgcctgtttgcgccgttaatggcggcagcggcggggtcactcaccaccagtctgttctttcatccgcatttttcgttacccatcgcccattacacgcagatgcggctggtggacattgccagcggagcgatcgtcgcggcgatcgccattgccgccgggatggtcgccgtctggtgccttccgcgtctgcatgagttgctgcaccgcctgaaaaatccggtcctgattctcggcattggcggttttatactgggtattctgggcgtcattggcgggccgcttaccctgtttaaaggcctggacgaaatgcaacaaatggcgtttagccagacgctgggcgcgggagattattttaccttagccgtcgtcaaactcgccgcgctggtcatcgcggcggcgagcggctttcgcggcgggcgcatttttccggctgtgtttatcggcgcggcgctggggctcatgctccatgcccatgttgaggccgtacccgcggcgattaccgtcgcctgcgcgattcttggcttagtgctggtagtgacgcgcgacggctggctcagtctgtttatggcggcagtcgtcgtaccggataccaatctgctgccgctgctctgcattgtgatgctccccgcctggctattgctggcgggaaaaccgttgctggccgccaaccgtcacgaaccctaatccggcgcagcgggggccattatcccccgttgcgggcttccagcgcccgggtcacggtacgcagtaattccggcagatcggcttttggcaacatcacttcaataaatgacagacgttgtgggcgcgccaaccgttcgaggacctctgccagttggatagcctgcgtcacccgccagcactccgcctgttgcgccgcgtttagcgccggtggtatctgcgtccagttccagctcgcgatgtcgttataccgctgagccgcgccgtgaatggcgcgctctacggtatagccgtcattgttgagcagcaggatgaccggcgcctgcccgtcgcgtaacatcgagcccatctcctgaatcgtgagctgcgccgcgccatcgccgataatcagaatcacccgccgatcgggacaggcggtttgcgcgccaaacgcggcgggcaaggaatagccgatagacccccacagcggctgtaacacaacttccgcgccgtcaggaagcgacagcgcggcagcgccaaaagctgctgtcccctggtcgacaaggataatatctccgggtttgagatactgctgtaaggtttgccagaagctttcctgggtcagttctcctttatcaatccgcactggctgtccggcggaacgcgtcggcggcggcgcaaaagcgcattccaggcacagttcgcgcagcgtagacaccgcctgcgccatcgggaggttgaaccaggtttcgccgatgcgcgacgcgtaaggctgaatctccagcgtgcgttccgccggtaattgttgggtaaatccggccgtaagggtatcgacaaaacgggtgccgacgcagataaccctatcggcgtcctctatggcctgacgcacttctttgctgctggcgccagcgctataggtgccaacgaagttcgggtgctgttcatcaaaaagccccttccccatcagtagtgtcgcatgagcgatgggcgtttccgccatccagcgctgcaacagtggtcgtaaaccaaaacgcccggcaagaaagtcggccaatagcgcaatgcgccgactgttcatcaggcactgacgggcgtgataacgaaaggccgtctccacgccgctttgcgcttcatgcacgggcaacgccagcgcctgcgtaggtgggatggccgtttttttcgccacatcggcgggcaacatgatgtatcctggcctgcgtgcggcaagcatttcacccaacacgcggtcaatctcgaaacaggcgttctgttcatctaatattgcgctggcagcggatatcgcctgactcatgcgataaaaatgacgaaaatcgccgtcaccgagggtatggtgcatcaattcgccacgctgctgcgcagcgctacagggcgcgccgacgatatgcaagaccgggacatattccgcgtaactgcccgcgataccgttaatagcgctaagttctcccacgccaaaggtggtgagtagcgctccagcgcccgacatgcgcgcatagccgtccgcggcataagcggcgttcagctcattggcgcatcccacccaacgcagggtcgggtggtcaatcacatggtcaagaaactgcaagttataatcgcccggtacgccaaaaagatggccaatgccgcatcctgccagtctgtccagcaaatagtcggccacggtataggggttttgcatgacagctttccttctgacgttgatattatgttgagtattaaggaatgccgatggctgtccagcacggtggggatgaaagcctggaaaacaatgtttacagcggcaaacagtaaaagccggataccgcctggcgagtgtaaccgtatacactatttattcacgccacagggggaaaggtcatgatttatcagcccgatgagaatcgttatcacacaatggagtatcgtcgctgcggacgcagcggcgtcaaacttcccgctatttcgctggggttatggcacaacttcggcgatacgacacgggtagaaaatagccgggcgctgctgcaacgcgcgttcgatctgggcattacccactttgatctcgccaataattatgggccgccgccgggctccgcagaatgcaattttggccgcattctgcaggaagattttttaccgtggcgtgatgaattgatcatctccaccaaagcgggctacaccatgtgggatggcccttatggcgactgggggtcacggaaataccttatcgccagcctcgatcaaagcctgaaacgtatggggctggagtatgtcgatatcttttatcaccatcgtcccgatcccgaaacgccgcttaaagagacgatgaaagcgttagatcaccttgtgcgccatggcaaagcgttgtacgtggggatctctaactatcctgccgatctggccagacaagctatcgatattctggaggatctcggcacgccttgcctgattcatcagcctaaatattcgctttttgagcgttgggtagaggacgggctgctggcgctgttgcaggaaaaaggcgtcggtagtattgccttctcgccgctggcgggcgggcagctcactgaccgttatttgaatggtattccggaagattcccgcgcggcgagcggaagccgtttccttaaaccagaacagattaccgccgacaaactggaaaaagttcgccggttgaatgaactggctgcgcgacggggtcaaaaattgtctcagatggcgctcgcctgggtgctgcgtaacgataacgttacctcggtactgattggcgccagcaaaccgtcgcaaatcgaagacgccgtgggaatgctggccaatcgccgtttttcagcggcggaatgtgcagaaattgacgctattctggagggccggttttagcaaaaaatgctctccttcatgatttaagagttaaggcgatgaaacaaatctttactgctttgtaatattgcattaacaggccggcgacggctcgatcgtgaaggagagaaagtatgttcaggtcactgattctggcggcagccttgctggcttttacaccgcttgccgcgaatgcgggcgaaatcaccctgttgccctcaataaaattacagattggcgatcgcgatgattacggtaactactgggacggtggtcgctggcgcgaccgggattactggcacaaccattatgaatggcgtaaaaatcgctggtggcgccatgacaacggctatcatcgcggctgggataagcgtaaagcgtatgaacgcggttatcgggaaggctggcgcgatcgcgacgatcatcgcgggcgaggccggggtcacaaacatcatcactaagcctcctgctgaataacagcccgatgacgcccacgcatcgggcctgctatctttctgtctttatgacaaccccatcaccgttccaaccagcaaccagatattcagggcgacgaccagcacgacaattatccagccaacctgttttacccgccgcgtgttcaccagctcgcccattagcgtagcgttactggtgaaaatcaggagcggcaccagcgccagcgcaataccaaaactcagcagcacctggctcatcaccagaattcgggtagggtccagccccatcaaaatcacaataaatgagggcagcatggtaatggtgcgccgtacccacagcggaatgtgaaaacggacaaacccttgcatcaccacctgccccgccagagtccctaccacagtggaggaaagccctgcagctaccagactaagaccaaacaccgttgccgccgcatggcttagtaacggttccagcgtcaggtatgcctgatcgaggtcggcgatgccggtgtggccgctaaaatgaaacgccgccgcggcggtcgccatcattgccagattgacaaaaccggcaatcgtcatagcaatagcgacatcccatttcgttgctgagtaccgttgttgccgtgttccgccgtgcagatgctgcgttaatgacgagtgcagataaatcacgtgcggcataatcgtcgcgccaagcacgccggcggctaagaatacggcttccgggttcggtagcgccgggataaccattcctttgccgagctgcgccatatcaggctgagagaaaaacagctccacaatgtaagcggcggcgacaaaaagcagtaaaccgccgatgactttttcaagcggtttttgaccgcggcgctgtaacattaaaatcagaaacgtcgcgataccggtcaataccgcgccctgtaataaagagacgcccaggatcagcttaaaacctattgccgcgccgataaattcagctaaatcggtggccatcgcgatgatttccgcctgtacccagtaaaaccagactaccggacgcggataatggtcgcgaatttgctccgccaggttcttgccggtggcgatcccgagttttgccgagaggatttgaatcagcatcgccatcaggttcgcccagaccaccacccagagtagctgatagccaaagctggcgccggcctgaatattggtcgcgaagttaccaggatcgatataaccaatcgcggcaatgaacgcaggtcccattaatgcgagccttagcttgcgcgccgcccgtccgctgctattctctacgcgattgtcagtcatcttttgcctcaaaaacatagcctttgctatgtttcatgctatgtttattgataatgattatcaagtgcatttcaatgggtacgggtgattactttgatagtgtgaaacgatagaccgatacgatgacgacctgtatcagaacagtttggcttaacattacaagattagcacactgatataacttttcattttcatattcagtacagtaaaagtgtattacagatcactaattttgaatctcgtcacaggtccttattatagtgtgtgttggatctcgttttctttacggctgttgcatagaatgtgcacgaaaattaaacctgcctcatatttggagcaaatatggaccgcgtccttcattttgtcctggcgcttgccgttgttgcggtactcgcactgctggttagcagcgaccgtaaaaaaattcgcattcgttacgtcattcagttacttgttatcgaagtattactggcctggttcttcctgaactcggatgttggccttggcttcgtaaaaggtttctccgagatgtttgaaaaactgctcggatttgccaacgaagggacaaacttcgtctttggcagtatgaacgatcaaggtttggcgttcttcttcctgaaagtattgtgcccgatcgtctttatttccgcgttgatcggtattcttcagcatatccgcgttctgccagtggtcatccgcgctattggttttctgttgtccaaagtaaacggtatgggcaaactggagtcttttaacgccgtcagctcgctgatcctcggccagtctgagaactttatcgcttataaagatatcctcggcaaaatgtcccgtaaccgcatgtacaccatggcggcgaccgcaatgtctaccgtttccatgtctatcgtgggcgcgtatatgaccatgctggaccctaaatatgtggtcgcagcgctggttctgaacatgttcagcacctttatcgttctgtcgctgatcaacccctatgtcgttgatgccagcgaagaaaatattcagatgtcgaacctgcatgaaggccaaagtttcttcgaaatgctgggcgagtacattctggcaggttttaaagtggcgattatcgtcgcggcgatgctgatcggcttcatcgcgctgatcgcggcgctgaacgcgctgttcgcaacggttaccggttggttcggctacagcatctccttccagggcattctgggttacatcttctacccggtcgcatgggtaatgggcgtaccgtccagtgaagcgctgcaggtaggaagtatcatggcgaccaaactggtttccaacgaattcgtggcgatgatggatctgcagaaaatcgcctctaccctctctccacgcgctgaaggcattatctccgtcttcctggtgtccttcgcgaacttctcttccatcggtattattgcgggcgcgattaaaggcctgaacgaagagcaaggcaacgtggtttcccgttttggtctgaaactggtttacggttctacgctggtgagcgtactgtccgcctctatcgcggcgctggtactgtaagtctgggtttaatgcagaaaccggggagctatccccggtttttttatgccgcttatttgcctaacgggcgcgggcggccaatcagatatccctgcaaactgtgtacgccaagctgcaatagcagatcgcgctgcgcaggcgtttcaacaaactcagccacgacgctcaacgatttcgctttcgctaaatcagtgatggatttcacaatcatcgcatccagggagtccgtcagaatatcttttacaaaacaaccgtcgattttaatgatgtccgccttgaggcgttttagccgttcatagtttgcataaccggtgccgaaatcatcaatggcgatttttaggccgaacttacgcagttgattgatattgtgcatactgatttcggaatgagagaaggcctgttcttcagtaatttcgatgatgaccgaagcaggcgggacgccatagcgtttaaaaagctgcataatgcgcgacgccgtctctttttgcagcagcgtcaacggcatcaaattaaccgaaaaacgtgccccctgttccgctgaaggatgcgcggacagccattgcaggagcgcttccatcacctgcatatcaaaccgtatgctcaggttaaactgggcgataagcggaatgaactgattcggcatcatgataccgtcgtcgcaccgaagccgcgtcagaatctcgtcatacccttttccctgcgcgtcgcgaatgggttgcgcatacaaaaccagcgcgccgcgctccagcgcctgacggattttctgcaaccgcagcacccgttccgtcgtctgcccggaagcggcttcaatactctgggtcagtgcaagcacccgacggtgcgaacaggattgctccgccagccagcttaattgccccaacagcggttgcaaggtttcctggcgaccatcgaatgttccccacgatgcgccgtattccatgtccagaccggtattgttccagtaaattttgcggttattaagcacgttgagcatatattgcaggcgggcttccgtctccggtcctgtcagcaccagcaataattcactgcccggcagatggaaaattttctccttttccagcagcagcggctgcaacatgcgaaacacctcgcgttcgcaatgcacgcgcatctgcataccgtaatgacggctcagaaattccaggttttccatgcgtaaataacacacgctttgcccggcatcctgtaaaagaaactgctccagcgcacgcaggttaggcagttgcgtcaacggatcggtcaatgcctgcgagtgccattgtcgattcaaccattcgctacgctgattaatccgcgccatgtacaacaaacaaatactaaaagaaatgagaactgaaaggataaatgccagcgaatattctgaacccacgccctgcagaaaattgcggttatagctaagcaggaatagcgcagtgagagcccaactaaaattcaacagcggatagctgattttccccacgccgatggtaaatccaatgaacagaactggcaccagatagccagcaatatactttgtctcgaaaggcgtacacagcaccgctaatagcgtcgccagagtggcaaaccagagaagcgtaaacaggcgtttttctttggcgagataaggagcgacatccctccgccagaaaatacgcatatagtgcgggctgactatcatccgcagcggataatagaaaaagagggtaaaaataagcgcggcagaaatcagactcaataaatcgacaatcgagaaaatagcggtgccggtgccaaagaaggtagagatggtcaccgggaaagccaggtagtgccccgccagatgcatactgatttttataccaaacggcgtcattaaccctaaccagaaaacgcgtagccagatgccttggttgggtattccgtagcgccagcgcgcgcccagctgccagcgtacgatagcgcaaaccagcagcacgggaaacgtttggcaaaatagcagcaccatcgcctgtggcagaggtaaatgaaaattccattcattagtcaacatcattccgcctaccatcggcgcgacgccacggcggccaaataaaaacagcacggaaaacatgacgcagagcggtagccaggccagaaagatatagctggaatcaattgtggcgcggggagaaatgagacgagatagcagaatagccggaacggtcaggcagaaggccagtaagaatatttttatattttttaatacgttacacttatccggcattgctttaatgctcacatcattatataaggcgcatgaataataagtatattcgcattatgaagcaatctaacaaaagctcatattgaccgcaaaagcagcggcaaacaaacgcacctgaagagcagatcagaggccataaattttgtgacaaaaagcaaaaacccccgcttttcagcgagggtttgaatgttggtggagctaagcgggatcgaaccgctgacctcttgcatgccatgcaagcgctctcccagctgagctatagccccatagtagcttttacgtatacgccaaatttatcgggagtaaatttggtggagctaagcgggatcgaaccgctgacctcttgcatgccatgcaagcgctctcccagctgagctatagccccactacgtaaagcttgtcgagttgacgggcggcatcatatgaattccctcggcatgtgtcaacggcaaaatgaacttgccgaattcaatcgctgaaaaagcattcaaataaaggacattgcggcacaactcgcattcagtagttaaacacgtcacggtttcgactaaaatggtgctataaaatgaaccactaattaaccccacgactattcagggaatcgttatgttcaaggaacggatgacgccagaagaactcgctaatctcaccggttacagccgacaaaccatcaataaatgggtacggaaagaaggctgggcaacatcgcccaaacctggcgtccagggcggtaaagcccgtctggttcatgtaaacgaacaggttcgtgaatatatccgcagcgctgaacgttcagttgaccatcacgcagacacattcacgcctgccagcaacgcatcgcttgaagcgctgctcatgacgctcgccaaagagatgacctcatccgagcagaaacagtttacctctctcctcgtgcgtgaagggattaccggtttgttacaacgcttagggatacgcgatagcaaataatatgaaaagattacgcagtaaaatgaccactgaagagctggctgaatgcctcggcgtggccagacaaaccgtcaatcgctggatcagagaacaacactggaaaaccgaaaaatttcccggcgtcaaaggcggacgcgcaagactcatccatattgatgccagcgtgcgggagtttattctcaatattccggcttttcgcaaactgcctgcgttttatcaggcggaagaggctttcgcagaatatgcgaacgcggcgcacagtcatgcttatcgacaaattattgatgccgttgaaaatatgtctgctcaggaacaggaaaaactggcgctgtttttatcgcgggaaggtattcgcggatttctgacgcgtttaggtatcaatgaggcggactaacaaataataaacggcaggcgtctgccctgccgtttattctgtttcagctggcgttactgctgactttcacgctcggcgataaagcccagcgctttgttgatgcgctcaatgctgcgggttttaccaatcgcatgtacggtgacatccagcgcaggcgactgcccggcaccggtcacagccacacgcagcggcatccccactttacccatccccacttccagctcatccgccgtggcctgaatcgcgtggtggacgttttctgctgaccagtccgtaatcgccgacagcttgtcgcgcaccacttccagcggctgacgcgccaccgggcggaggtgttttttcgccgcatcggcgtcaaactcgctgaagtcttcatagaagtagcggcagctctgcgccatctctttcagagttttgcagcgctcgcccagcaacttcaccagttcagcaagctgcgggccgttacgggtgtcgatattttcctgctcgatatgccactgcaaatgcgtcgccacatattccggcgccagcgtattgatatagtggtggttcagccacagcagtttatcggtgttgaacgcgctcgcagacttgctcaccgcaccgagggagaacagcttgatcatctcttcgcgagtgaagatttcctgatcgccgctggaccagcccagacgcaccagatagttcagcaacgcttccggcagataaccgtcatcgcgatactgcatcacgctcaccgcaccgtgacgtttagacagctttttaccgtcgtcgccgttaatcatcgacacatgcgcgtacatcggcaccggcgcgtttaacgctttcagaatgttaatctggcgcggagtattgttgatatggtcttcgccacgaatcacatgggtaatttccatatcccagtcgtccaccaccacacagaagttgtaggttggggaaccgtcggtacgacgaatgatcagatcgtccagctcctgattgctgaattcgatcgggccacggatctgatcatcaaaaataacggaaccgtcctgcgggttggcaaagcgcaccacgcatggctcatcgtcggcatgatgttcgtgactgtgacggcaacgcccgtcataacgcggcttctcgcctttcgccatctgatcttcacgcagttgctccagacgctctttagagcagtagcatttataggctgttcccgcctccagcatctcgtcaatcaccgcgttatagcgatcaaaacgtttggtctggaaatatgggccttcgtcccattccaggttcagccagttcataccatccatgatggcttcaatggcttccggcgtggaacgctcaagatcggtgtcttcaatacgcagcacgaactcaccgccgtggtgacgtgcgaaaagccaggaataaagagcagtacgcgcgccgccgacgtgcagataacctgtcgggctaggcgcgaagcgagttttgattttcatgaaatggccttacgtttataaagatgccgacaaccggcaaatcctggaaagatgaatagccttgtattctatcactgtggcttgattcctcaatgttgatccggtcagaacgctgcgctttgctatttccgtatagaaatcatgcagtgcggggtaattcacgatcgttttgtttaattttacgacgaacaaacaaaaactttagaaaatgcgttgactcattttcaactctccctataatgcgactccacacagcgggggtgattagctcagctgggagagcacctcccttacaaggagggggtcggcggttcgatcccgtcatcacccaccaactactttatgtagtctccgccgtgtagataagaaattgagaagtgggtgattagctcagctgggagagcacctcccttacaaggagggggtcggcggttcgatcccgtcatcacccaccactttctcgccagctaaatttcttattgtgaagtaccgaagtgggtgattagctcagctgggagagcacctcccttacaaggagggggtcggcggttcgatcccgtcatcacccaccacttcgggtcgttagctcagttggtagagcagttgacttttaatcaattggtcgcaggttcgaatcctgcacgacccaccaatgtaaaaaagcgccctaaaggcgcttttttgctatctgcgatatggaagattcgaacctgtcgcaggttcgggtcttgcctgatgcgctgcgcttatcaggcctacagacgacaccgcacacgtaggccggataagacgttagtcgccatccggcacagacattataccgtcaacgccgccaccagtttctccagtgctggcgttgcctgctgctggtcatacacaatatacaaatccgccggaatacgttcctctaacggacggaacaccacacccggccagctcatttgcgcatagccatcagccatcaacgtaatcccgatccccactactgatcatcgccaacaccgtttgcggctcaaccacttcccgaataatcattggcgaaaagcctgcctgttggcatacacgttgtaaaaatccccaatcagaatgtacggaaggcaacgtaacaaaatattcattgcgcaacgccgccaacggcacagaatctctggatgccagatcgtgatcttccggaactgcaaccatgaatgcagattcatgcaaacgtatgctggtaaaaccgactgctggttcgatagccatacgccagatccctgcatcaagttcccgacgctctaacaacgccatttgcataccgggagacttttcgcgaaaaagtacttcaacattgggatttgctttcaaaaagtgacgcatcgcaggacgcattcttccccacagcgccgtaccaaccacacccagttcaatgcgccccgcttcaccgcgaccaatctgctccactcgcgccagcgcctgatttgcactggctaacaagcgacgtgactcctccattaaaactttcccggcatgggttaatgcaacgctgcgggaatgacgaataaacagcaatgtacccagttgctgttcaagttctttgatatggatactcaagggaggttgtgacatatttaaccgggcagcagcccggccaaaatgcaattcttctgcaacagcgaggaaataacgtaatagctttagatcaatacgatgggctcgttccatcactatcgcactccaggaataagggataacgtctggaatttaccatattacctagtaaaaaatagatttaacgacaagatacccaatatacataaatacaatagataataccccgggtaaaacatttggtgcgggaataggtatacggcataaagtaaaaaatgcgccaataccaaatccaataccggaggagagaataatttctttcatgctgtgtccttgttcataaaaatggactggcgaacatcctctcgccagtcaaataaaattaatgtgctaatgatttggtcgacagtttttctggatggtgctgatatttaaagaacaatgcaaaaataacggccaatgccagagcgtaggcggcaaagaccagccagatagtttgccaatcttttacgccatcaatagaaaaataatccacggccataccgcttaaaagagacccaatccacgcccccacgccgttaaccatggtcataaatagcccctgcgcgctggcgcgaatacttgagtccacctcctgctctacaaatactgaccctgagatgttgaagaaatcaaatgcgcagccataaacaatcatcgacagcagcagtagcacaaagccaaacggggatggatcgccaaaggcaaagaagccgaaacgcagcgtccacgccagcatactcatcagcattaccgttttaataccaaagcgtttaaggaagaacggaatggtgaggataaagcccacttccgccatctgcgaaactgaaagcaagatagagggatacttcaccacaaagctgtcggcaaactcaggattacgggcaaaatcatgcaggaacggattaccgaagacattggtaatttgcagcaccgcccccaacatcatcgcaaacaaaaagaagattgccatgcgtggatttttaaacagaacaaaagcatccagtccgagcttactggcaagcgtggtgttcgccttcttctcggctaccggaattttcggtaacgtcagcgcatacagggccagcaataacgatgcgccagaagcgatgtataattgcgcactgctcagttccagccccatcaggctcaccgtccacatcgcaacaataaaacctattgtgccgaaaacgcgcacaggcggaaatgacgttaccggatcctgacctgctttcgccagacaggagtacgaaacgctattggataatgcaattgttggcatatacgccatcgcattcaccaacatcacccagaacatcgtctggggatcggtaacggtggtggcgtacaataacgcccccgcgcaaaccagatggcaaagcatgtaggctcgctcagcgcgcagccatttatcagcaatgatccccataatacccggcatgataatcgctgccagtccttttgagctgtagaccataccgacattcgcgccggtaaaatccagagtgttgatcatgtaagagcccagggtaaccagccagctcccccagataaaatattgcaagaacgacatgacttttaagcgggacgtaatacccattttttattccttgccgtgagataaagccccaatacggggccgtagtcattgtgtttaggccagcttacgtaaaaagccgcaaatcagatttataaagttctgccgggaaagttcagccgccgccagcgtttgcgcatgggagagttttacatcgcccagcccttccgccagattggtgatcgctgagacggcaacaactttgaggccacaatgacgtgcgctaatcacctcagggacaacggacattccgaccacatcgccgccaataatctgcatcatgcggatttctgccgccgtttcgaagttcggacccggataagaaacaaatacgccttcagtgagggtgaatccctcctctgccgcaacggactgaagcatggcgcgataatctgcgtcataagcattagccagcgagaagaagcgatcgccataacgatcatcgtttggccccaccatcggcgtaccgggcatcgtattaatgtgatcgctaagcgcaaccaggctacccggccccacttccggacgcagagatcctgccgcattggtgcagaacaacacttcacagcccagtaatttcaacgtgcgaatggcatcggttatcaccgccattccacgcccttcataaaaatgtccacggcctttcatacaggccaccggaacccccgccagatggccgagcaccagttcaccagcatggccgtgtacggtgctgacgggaaatcccggcaatttctcgtaagaaatggctaccgcatcttcgatttggtccgccagagcacccaacccggagcctaaaataaacgcaactcgcggggtaaatgccggtttatgtgcatgaacaatatcaacacaatactcaggattatgagaaaaaagagcgtgaggcataagtttccttgttctatcggatttaatttgactcctttttataacgaccatcgccccttgctgaccaatacacttttcacgtgtcatcaatagccatttaatatcgataaatttagatcgcttctgtattaatacagagggaaaacagtattggtttttgcttgcaattcatattaacaatatgccgctttcatatttataaattgcctctttttaattaacccattaataattatcggcatagggaaatatgctatgaaaaaaattcttactctgacgctttcttctttactcattattcccgcactcacccatgcggaatttaaaggcgggttcgccgatatcggcctccattacctcgactggacatcagacaccacggaaaaaaccagtaaaaaatcccataaagatgattttgggtacctggaactggaaggcggagcgaattttagctggggagaaatgtacgggttcttcgactgggaaaatttttacaatggccgccacgctaaaccaggcagcgaacagcgttacacctttaaaaataccaaccgtatttatctgggcgatacaggattaaacctctatctccatgcctacgggacgtacggttcacctcatcgcgctaatttccatgatgacatgtttctctatggtttaggctataacttcacaggtaacggttactggtttaaacccttctttgccaaacgttataccgatcagacctactacacaggcgataatggttatgtattaggttgggtggccggctatagcttctcgttgggtagtgagaaattcagcgtaacgaactggaatgagtatgagtttgaccgcgatgcgtcctacgctgcgggcaatggcgggaaagatggcattaatggcgcagtagcgctgtggtggaatgcgactcctcacctgaccgcaggagtacaatatcgttacgctgataataagttaggagaatccttcctgcaggatggcattatttactccatcaaatacctgttttaacacacagccctgtcaaaaatggcagggcaagaccgcacctcacacacggacagatagatatttatagctgatacagcggatctttcgccctcgcggcggttaattcgctggcctgggtacgcaccacgtcccacaacgcctgcgccgccgtggagagcgatcggttttttcgccgcgccagcatgagctgcctttcaactacgggcgtcagccgtttaacctgtaagtggctgccctgcgggagcggtaacgccagcgcgggcagcacgctgatgccgattcccgcttccaccattggaaacagcgtggccgggtgaccaatctcctgcacgatatccgcctcaatagcaaaatgggccagcgccgcatcaatcagcggtcgactgccggaagcataatcctgtaagaccagcgaggcctgtttaagatcctgccagctcacccattcctgatgcgccagcggatgatcctggcgacacaacagtaaaaaaggctctgataagatggcttcacactgtaaatccaccgctgcgccgggatcgataacgatgccaaaatccacttcaccctggcggatgctctccagcacccactgctgcggacgatcgtgcaatacaaaatcaatagcgggataaagtgaattactttgggcaatgcattgcggaataagatgcgcagaaatggtttggctcgcggcaacgcgcacggtgccggttaattgtgtccctactctgcctgcatcgcgcagtatgctgttcagttcatcaagcacccgctccagacgcgtcgccagttgttgccccgcctcggtcagcaccacctcacgcgtagtgcgatccaacagtctgacgccggtttgccgctccagctcttttacgctatgactgaccgcagactggctcagtccaatcctgtcccctgcccgactgaaacttttggcctgggcgacggtaataaaaatacgcagttgacgcagtgaatagttcatcgactagattcatatatagatgcaataaatcaattttatttctcaaagcgaaaaacgcaaaatagctgcaccgactttcaggagtttttatgaaactttttcgtatccttgaccctttcacgctgacacttatcaccgtggtactactggcctcttttttcccggcggaaggtggctttgtgcctgtcgttgaaggcattacgacagcggctatcgctctgctgttttttatgcatggcgcgaagctttcgcgtgaagcgatcatcgctggcggcagccactggcggttgcatctgtgggtcatgtgcagcacttttgtgctctttcctgtcctcggcgtactgtttgcctggtgggcgcctgtcaatgtcgaccctatgctctacagcggctttctgtatctgtgtattttgcccgccaccgtgcagtctgcgattgcgtttacttcactcgcgggcggtaacgtcgcggccgcggtgtgctcagcgtctgcgtccagcctgctgggcattttcctgtcgccgctgctggtcggtctggtaatgaatattcatggcgcgcagggcagtctggaagaggtgggcaaaattatgctgcaactgctgctgccttttgtgctgggacacctgtctcgcccgtggatcggcaattgggtcgcgcgcaacaaaaagtggatcgcgaaaacggatcagacctctattctgttggtggtctactcggcgttcagcgaagcggtggtcaacggcatctggcacaaagtcggctggggatcgctgctgtttatcgtcgtggtcagcctcatactgctggcgatcgtcatagccattaacgtctttgtcgcccgtaaatgcggcttcaataaagccgacgaaatcactattgtcttctgcggttcgaaaaaaagcctggccaacgggatcccgatggccaatattctgtttccgacgtcagtgctgggtatgatggtattaccgctgatgatcttccaccagatccaactgatggtctgcgcagggctggcgcggcgctacaaacgccagaccgagaagttacaggcgcagcaggaaagccgcgccgcgaaagcttaaagcgggcgtttcaggggctgtaccagttgcgtcagcccctcggttttaatcagcagcgtgatttgcatcaactcccccagtttacccgccggaaattgatctttacgggcaaaccacagcaaatactcttccggaaggtcgatcaatcgacgtccctgatatttgccaaagggcatcacggtgttggcgatttcaaccagctgctctttttccatctcaggcacccagtaagcggatcatttccgcttcatcaatcacggtaatacccagttcctgcgctttggccagtttggagcccgccgcttcaccggcaatcaccagatcggttttcttcgatacgctgcctgccactttcgcgcccagcgccactaaacgcgctttagcgtcatcgcgagacatctggctcaggctaccggttagtaccacggttttaccggcaaacgggctatcgatctcttgcacattaatgactaccggcgcgggccagtgaaccccttccgccagtagctgcccaatcacgtcacgattactctcttcggcaaaaagttaaagacgtgcgtagcgaccacaatccccacgtcaggtactttctgcaactcgtcaatggtggcggcctgcagcgcctccagcgtaccgaaataagccgccagccccgccgccgtcgcttcacccacttcacggatgcccagcgcatagagaaaacgcgcaaaggtcgtcgttttggatttttccagcgcgttaacaacattttgcgcggactttggccccattcggtccaggccggtcagtttacccgccgtcagacggaacagatccgctggcgtatggacatactccctttccaccagttggtcgatgatcttatcgcccatcccgtctacatccatcgcccggcgcgacacaaaatgtttcagcgactctttacgctgcgcgccgcaaatcagcccgccggtacaacgggtaacggcttcgccttcaacgcgctctacgtccgatccgcacaccggacagtgcgttggaaacacaatcggacgcgtctcttcagggcgttcggacagaaccacgttgaccacctgagggatcacatcgcctgcccgacggataaccaccttatcgccaatgcgcaagccaagtcgctcaatttcatcggcattatgcaacgtggcattgctgaccagcacaccagccacctgaaccggttccagacgcgccaccggcgtaatcgccccggtacgcccgacctgaaactcaacgtcgcgcacaaaagtcatctgctcctgagcaggaaatttaaacgccaccgcccagcgcggcgcgcgggccacaaagcccagcagttcctgcaaagccagcgagttgaccttaatcaccacgccgtcgatatcaaaaccgagcgtagggcgatctttttcgacgttgtgataaaaatccagtaccgcctggggagaatcgcacagcgtcacgcgatcgctgaccggtaacccccacgctttaaattgcagcaaacgtcccagatgcgtatccggcaactcgccgccttccagaataccgacgccgtagcagaaaaatgttagcggtcgcttcgccgtaatacgcggatcgagctgacgcagcgaacccgccgccgcgttacgcgggttagcaaacactttgccgccagtgcggcgcgcgtcttcattgatcttttcaaacccggcctgcggtaaaaatacctctccgcgaacttcaagacgcgccggaatgttatcgccgtgcagctttaacggaatggcgcgaatcgtgcgcacgtttgaagtgatatcttcaccggtggtgccgtcgccacgcgtcgcagcgctcaccagcacgccgttttcatacagaatgctgaccgccagaccatccagctttagctcgcagcaccagatgacattttccgtgctttttagacgatcctgcactcgcttgttaaacgccaggaagctttcttcatcaaatacgttatcgagcgacagcatcggtacttcatggcgaatctggttgaatgccgtcagcggcgccgcgccaacgcgctgcgtgggcgaatccggcgtgataaggtccggacgttgcgcctccagctctcgcagttcccgcatcaggcggtcatattcggcgtcgggaatctctggcgcatccatcacatgatacagatattcatgatggcgaagcgtggttcgcagttctgtcagttgttgttcgattggttccatatcacaccatcaatgataaaaaacccccgacaggcgggggttacgttaaaaatgtcacacctgcgttaacctcaggcgttagcgtccatcacctcgcggatgcggtcctgatattcgcgcagtttctgcggcgtcatcatccgacgctggtcatccagcacgacgccaccgacctcatcagcgatatgctgcgcggattgcagcatcagcttgaaattctgcagcgcatcgccgtaagacggtacctgcataaagatagtgacgccaggcgtagtgaagtccgtcatttcaggatcgaacgttcccggattgaccatattcgcgagactgaacaaggccgggccgctgccgtccgggctcaaatgacgatggaaaatattcatatcgccaaatttaaagcctgactgctgaatactgttcagtaacacttcaccattaagctcgctgccatgatgggccgcgacgttcataatgatgaccgcctctttacgctgcggtttttccacaaccggcgcttcttccactaccggttccgcctcaaccacaggttccgcaggctggaaggtttgcgctgatggcggcggcgcgggctgcgcaacaggctgcggcgcttgcgacggcggtgcaggctgctgttgcggcggctgtaccggcggcgcagatggctgaacctgctgaggctgcggcgcaggttgaaccggttgctgaaccggctgttgcatcggcgcttgcggctgcggcggcgccgctggacgcggttgcgcagacgcataaggcggctggtactggtgttgcggcgactgacgaggggcatcatgctcctgcgactggccgggggcatgatttacgcggtgaacacgaacttcacccacgccttcgtcttcttcgtcatcgtcgtcatacgagtcgtcgtcgcgtttcgatttcatgcgttttagtggacgatcgcggaacatagaagatcgttctttacggctggtccagaaaccatgtaccagtaaagcgattatggcgatcgcgccaacaatgattaatatcagacgcaaatcctgcatcattatattctctgttgttctaacaccttgccaccacggcaaacatttactcactaagagtatttgccgattacgtcaagtgcaagtgtactgttggctttcgcagcataaagatgaaggaaaatgtgctttttgctgttttttcgaacatttccgaactatccaccgtctgataaccgggtaagatatcccacgtttacccagggctttaagaaaaaggagtatgtcctgaatatggtttcatcatccacaaccgtaccacgtagcggcgtctattatttctcgcaaggatggaagttagtcaccctaccgggaatccgccgctttgttattttacctttgctggtcaacattgtgctgatgggcggcgcattttggtggctgtttacccagcttgacgcctggataccttcgttgatgagtcatgtgccggactggctgcaatggctgagctatctgctgtggccgattgcggttatctctgttctgctggtctttggctattttttctctaccctcgccaactggatcgccgcgccgtttaacggccttttagccgaacagcttgaggcgcggttaaccggcgccacgccgccagatacaggcatactcggcatcatgaaagatgtaccgcgcattatgaaacgtgaatggcaaaagctggcgtggtatctgccgcgcgctattgtgctgctgattctctattttattcctggcattggccaaaccatcgcgccggtgctgtggtttttgttcagcgcctggatgctggcgattcagtattgcgactatccgtttgataaccacaaagtgccgtttaaaacgatgcgcgccgcgttgcgcacgcagaaggtggcgaatatgcaatttggcgcgctcaccagcctctttacgatgattccggtgcttaacctgttcattatgcctgtcgccgtctgtggcgcgacggcaatgtgggttgattgctggcgtgctaagcacgcgttatggaaataacgtaaaaatgtataaataagagatggcttatgctgtctcttattccatactgataaccattatttcccatcagcatatagatatgcgaaatccttacttccccatatctggctggaaggtatgctgggaaggtatcccaatttcatacagttaaggacaggccatgagtaagatttatgaagataactcgctgactatcggtcatacgccgctggttcgactgaaccgtatcggtaatggacgcattctggcaaaggtggagtcgcgcaacccgagcttcagcgtcaagtgccgtatcggcgccaacatgatttgggatgccgaaaagcgtggcgtactgaaacctggcgtggaactggtggagccgaccagcggcaacaccggtattgcgctggcgtatgtcgccgccgcgcgcggttacaaactcaccctgaccatgccggaaaccatgagcattgaacgccgcaagctactcaaagcattaggcgcgaatctggtgctgaccgaaggggcgaaagggatgaaaggcgctattcagaaagccgaagaaattgtcgccagcgatccgcaaaaatatctcctgctccagcagttcagcaaccctgccaacccggaaatccatgaaaaaaccaccggcccggaaatctgggaagacaccgatggtcaggtggatgtgtttatctccggcgtcggcactggcggtacgttaaccggcgtcacgcgttatatcaaagggacgaagggtaaaaccgatcttatcaccgttgcggtagaacccactgactccccggttattgcccaggcgctggctggtgaagagatcaaaccaggcccgcataaaattcagggtatcggcgcaggcttcatcccgggcaacctggatctgaaactgattgataaagtggttggcatcaccaatgaagaagctatttctaccgcgcgccgtctgatggaagaggaaggtattctggcaggaatttcttccggcgccgcggttgctgcagcgcttaagctgcaggaagatgaaagctttaccaataagaatattgtggttatcctaccttcatcaggtgagcgttatctgagcaccgcgttgttcgccgatctctttactgagaaagaactgcaacagtgatgccagcatgttaaaaacgcgtaaaaaagcacctttttgggtgcttttttgtggcctgcttcaaactttcacctcacctggcattgattcaccctgccggaactggtatttaaccagactaattattttgatgcgcgaaattaatcgttacaggaaaagcgttagctgaatcgattttatgatttggttcaaatcttcctttcgcggcataatgtttaatgacgagcgaaacgtcagcggccataagttgccagcaacggattgcgtagaacaccttttgtgtcgcgtcccgtttacgccggcgctaacaatacaggctaaagttgagccgccaggctagactttagttccacaacactaaacctataagttggggaaatacaatgttccagcaagaagttaccattaccgctccgaacggtctgcacacccgccctgctgctcagtttgttaaagaagcaaaaggcttcacttctgagattactgtgacttccaacggcaaaagcgccagcgcgaaaagcctgtttaaactgcagactctgggcctgactcaaggcaccgtcgtcaccatctccgcagaaggtgaagatgagcagaaagcggttgaacatctggtcaaactgatggcggaactcgagtaagtttttttccgggttcttttaaaaatcagtcacaagtaaggtagggttatgatttcaggcattttagcatccccgggtatcgctttcggcaaagcactgctgctgaaagaagacgaaatcgtcattgaccggaaaaaaatttctgccgacaaggttgatcaggaagttgaacgttttctgagcggtcgtgccaaggcatctgcgcaactggaagcgatcaagacaaaagctggtgaaacgttcggtgaagaaaaagaagccatctttgaagggcatattatgctgctcgaagatgaggagctggagcaggaaatcatagccctgattaaagataagcacatgacggctgacgcagccgcacatgaagttatcgaaggtcaggccactgccctggaagaactggatgacgaatacctgaaagagcgtgcggctgacgtacgtgatattggtaagcgcctgctgcgcaacatcctgggtctggccattatcgatctgagcgcgattcaggaagaagttatcctggttgccgctgacctgacgccgtcagaaaccgcgcagctgaacctgcagaaagtgctgggcttcatcaccgacgcgggcggacgcacgtctcatacctccatcatggcgcgttctctggaactgccggcgatcgtaggtaccggtagcgtcaccgctcaggtgaaaaacggcgattatctgattctggatgccgtaaacaaccaggtttacgtcaacccgaccaacgatgttattgagcaactgcgcgccgtccaggagcaggttgcgaccgagaaagcggaactggctaaactgaaagatctgccggcaatcacgctggatggacatcaggttgaagtttgcgccaacatcggtaccgttcgtgacgttgaaggcgctgagcgcaacggcgcggaaggcgttggtctgtatcgtactgaattcctgttcatggatcgcgacgcgctgccgacggaagaagagcagtttgccgcctataaagcggtcgctgaagcgtgcggctcgcaggcggttatcgtccgtaccatggacattggcggcgacaaagagctgccgtacatgaacttcccgaaagaagagaacccgttcctgggctggcgcgccgtgcgtatcgccatggatcgcaaagagatcctgcgtgaccaggttcgcgcgattctgcgtgcctccgctttcggtaaattgcgcattatgttcccgatgatcatctctgttgaagaagttcgcgcgctgcgcaaagagattgaaatctacaaacaggaactgcgtgacgaaggtaaagcatttgacgaaagcattgagattggcgtgatggtggaaacaccggctgcggcgacaattgcgcgtcatttagccaaagaagttgatttctttagtatcggcaccaatgatttaacgcagtacaccctggcagttgaccgtggtaatgatatgatttcacacctttaccagccaatgtcaccgtccgtactgaacttgatcaagcaagttattgatgcttctcatgcagaaggtaaatggactggcatgtgtggtgagcttgcaggcgacgaacgtgctacacttctgttgctggggatgggtctggacgaattctctatgagcgccatttctatcccgcgcattaagaagattatccgtaacacgaacttcgaagatgcgaaggtgttagcagagcaggctcttgctcaaccgacaacggacgagttaatgacgctggttaacaagttcattgaagaaaaaacaatctgctaatccacgagatgcggcccaatttactgcttaggagaagatcatgggtttgttcgataaactaaaatctctggtttctgatgataagaaagacaccggaactattgagattgttgccccgctctctggcgagatcgtcaacatcgaagacgtgccggatgtagtttttgctgaaaaaatcgttggtgatggcatcgctatcaaaccaaccggtaacaaaatggtcgcccctgttgacggtaccatcggcaaaatctttgaaaccaaccatgcgttctctatcgaatccgatagcggcattgagctgttcgttcacttcggtatcgacaccgttgagctgaaaggcgaaggcttcaagcgtattgctgaagaaggtcagcgcgtgaaagttggcgatccggtcatcgagttcgatctgccgttgctggaagaaaaagccaagtctaccctgactccggttgttatctccaacatggatgaaatcaaagaactgatcaaactgtccggtagcgtgaccgtgggtgaaactccggttatccgcattaagaagtaattcttgccgcagtgaagaatggcgcctttgggcgccatttttttgcctgtacttgcgccgccatccggcgatggtgcagtgcactgcctgatggcgctacgcttatcaggcctacaaggttgcgaacatttcagcgccaatccacgggttacaactgcgaggtcaccgggcgaaagcacttctcgcgcatcaggatcttcatcccatccgggccactctccagcatcctgcgttcggaatcggacacttgcagctcgcactgatagccgccagtgatgccaaacatcgctcgcgccacgcagatatcttccagcgcgtccagcccgctcgtttcaaaatgccccacgatacgtccctgctggcgaaccaccagccgataactcttcatcgcgcctcccctgccggcggcagaattaactcatcacagccacactgctgtgtccaggtcatcacctccagcacgcgctgcgccgcatcttttgccgcggtcgtcagttttttcccctgcacaataccgctgaccagctcggcgcagaagagatctcccgtcccttttaactccgtcgccacccgcggatgggcaaagacctccacgacctgcgcagtaacgaccgcaaccgttatggtctccagagactcgcccggcgcgctggtgataaccacccatttcaacgtatcggaaagcagcgattgcgccgccgccaccgcctcttccagcgtgcggcacggtttaccactcagcatctccagctcaaatacgttcggcgttagcccctgcgcctgcggcaacaaatgcgtgcgataagcctgcggaatttccgcctgcacatacattccactgtcggtatcgccaatgaccggatcaacaagaatacacacctccggatgcgaagcccggatcgccattagccacttcgaaagcaagacaatttggtctgcgctgcccatgtaaccggtggtaatcgcttttaattcacgtagcgcatcgcgctcattcaacgccgtaaggtagcctgcaaaccactcggcgggaataatgccgccataaaaggttttatagtgcggcgtattgctgaatagcaccgtcgggaccgccgtcacgcgtagtccctgcgctttaatggccggaacagcgatactgttgcctacgctgccgtacacgacctgtgactggacggcgacgatatcggtctgtaatgcccgatggttgtcgtcgaagagcactgactgaatatcactctcttgtcccataaaattttcctctcgctggacagcaggctaccgcctcattatcattgtcatatgctaaaattcattttgtcataggtcaataatgatcgacggaaaaaccgctaacgaaatttttgacagtatccgtcaacacattatcgccggcacgttacgggcggaggattcgctcccgccggtacgggagctggcaagcgaattaaaggtgaaccgcaataccgtcgcagcggcgtataaacggctgataacggcgggactggcgcaaagtttaggccgcaatgggacggtgattaaaggcagtccgtctcccgtagcgctggaaggcggcgatccacatacgcctctgcacgacctttccggcggcaatcccgatccgcagcgtctgcctgaccttagccgttattttgcccgtctcagccgcacgccgcatctctacggcgatgcgcccgtttcccctgaactacacgcctgggcggcgcgctggctacgggatgccacccccgtcgcaggcgaaattgatatcaccagcggagctatcgacgccattgaaagactgctttgcgcgcatctgctgccgggcgacagcgtcgcggtggaagatccctgttttttaagcagtatcaatatgctgcgctatgccggttttagcgccagcccggtcagtgtggatagcgaaggaatgcagcctgaaaagctggaacgggcgctaaatcagggcgcgcgggcagtgatcttaacgccgcgcgcgcacaaccctaccggctgtagcctgagcgctcgccgtgccgctgcgctgcaaaatatgctggcgcgttaccctcaggtagtggtcattatcgacgatcacttcgccctgctttcttcgtcgccctggcagccggttattgcgcagacaacgcaacactgggcggtgatacgctccgtttccaaaaccctcggccccgatttacgtcttgctattgtcgccagcgacagcgcgacctcggcaaaacttcggctgcggctaaatgccggtagtcagtgggtcagccatctgttacaggatctggtctacgcctgcctgaccgaccctgagtatcagcacaggctgacgcaaacgcggctgttttacgccgcccggcaacaaaaactggcccgcgccctacagcaatatggcatcgccatttctcccggcgacggcgtgaatgcctggctcccactggacacccatagccaggctaccgcgtttacgttggcaaaatccggctggctggtacgtgagggagaagcctttggcgtaagcgcgccgtctcacggtctacgtatcacgctgtcgacattaaatgacagcgagatcaacacgctggcggctgatatccatcaggcgctaaatcgctaacaggagaaaataacgtgcgagttcattttgttgtccatgagtcgtttgaatccgctggcgcttatctgaaatgggctgaagatcgcggttataccatttcatggtcgcgcgtctatgccggagaagcgctaccgcccaatgccgatgagttcgatatgctcgtggtatttggcggtccgcagtcgccgcgcaccacccgcgaagagtgcccgtactttgactctcgcgccgaacagcacttaattaatcaggcagttacggcccggcgaatggttatcggcatttgtcttggttcgcagctcattggcgaggcgctgggcgccgctgtgtgccaaagtccggaaaaagagattggtcactaccctattacgctcactgaagccggtctgcggcatccgcttatcgcccactttggctccccgttaaccgtcggccactggcacaacgatatgccaggactcaccgatcaggcgaccgtgctggccgaaagcgaaggctgtccacgtcagatagtgcagtacggtaattttgtctacggcttccagtgtcatatggaatttaccgtcgaggcggttgaaggattaatccaacattcgcagcaggagctggccgacgcgcaagggaagcgttttatccgctcggtcgccgagatgcgcgcatggaattaccagcaaatgaatgaaaagctgtggcgttttctggatgaactcacgctggcgcactcacagaaataaccacaccaggagtgcaacttattacccggctaacggtctgaggtgcagtgattattgcatgaaaaaggattttaccatgaagaaaattgtttgcgccgtcgttgcgctcctgctgaccctacccgcctgggcgaagctgaacgcccatgaagaagcgcgcattaacgccatgcttaatgcgctggcgcagaaaaaggatctgacattcgttcgtaacggtgatgcgcataactgcgaggaagccgtatcgcacctgcgcttaaaactgggtaacacgcgcaatcgtatcgacaccgccgaacagtttatcgataaagtcgcgtcgtcgtcgtccatcaccggaaaaccctatatcgttaaaattcccggtaaaagcgatgaaaacgcgcagccttatttacatgcgcttattgcggaaacggataagaatgttgagtaagaaaaaatcataatgccaggcgtgttactgtggttttttaaaggcgttatcgcgcttctgttagcgtttgctgtagggttaatcgtttactattatctggaaattcgtcccatagcccagaccgcattacagagcgcctctttctggttgtccgaatcgccgcagacgcgttttttgcgccgcgctgcggccaaaatacatcccaaatcttatactgccagattgctctatacccaagctggcgtggatgggcatttcaggatcgcgatctgggtgttctggttggacagcctgtaccgggacgacgagctgtatgccatgatgctggcgcaagcgtattatggccgggattcgcagggtaacgcggtttacggtacgaaaaatgcggcgttaacgttatttcacgtaccagtgacagagatggcctgccagcaacaagtacaactgatttatatgtttaaagcgccgtcactttaccggcctggttcagccaggctggtagaaagcagcaagcattacatgacgctttgccaggaacaaatacaacaataagaacaacagacgagcttttattataaaaggcggcggtaatgcgctggcgcacatagaaaatcggcaggatattcccgcttgtcaaaggcgccgttgcctgtgtttatcccaatcagctgaactcattagtttaaatccctgccccctggctgaaatgctcttcaccaaacacgccggtcgaaaggtaacggtcgccgcgatcgcagatgatcgccaccactatcgcgccgggcgtggctcgtgcgacgcgtaacgcgcccgctaccgcgccgccggaactcacgccgcagaaaatgccttcacgaacggccagttcacgcatggtgttttcggcatcattctgatgaatatccagcacctcatctaccagcgaggcgttaaaaatgcccggcatatattccgcaggccagcgtcgaatgcccggaatactgctgccctcttccggctgtaggccaacgatggtgaccggtttttcctgctcgcgcagaaaacgcgacacgccggtaatggtgccggtcgtgcccatgctggagacaaaatgggtgatgcgacctgacgtttgccgccagatttccgggccggtggtcgtgtagtgggcgtagggattatcaggattattaaactgatcgagcagtttgccctcgcctcgttcagacatagcgagcgctaaatcgcgcgccccttccattccctgctctttagtgaccagaatcagttccgcgccataggcccgcattgccgcccgacgctcctgactcatgttgtctggcatcaacagcttcatgcgataacctttcagcgcggcgatcatcgccagcgcaatgccagtgttgccgctggtcgcttcaatcaggacatcgcccggtttaatttccccgcgcttttccgcctcgacaatcatcgatagcgccgcgcgatctttcaccgatcctgccggattattgccttccagcttgacccagatttcactgccgttatccggccccagacgttgtaatttgaccagcggcgtattgccgatggtttgttctaatgtattcacgttttcagctcgtaaaaaagcccggtatgcgtagcgccaccgggcgataactatacaaattaacctatcaggccgattgcgccagagcaagttcctcttcacgcgtttcaatacgctggtcgccgttatacagacgcgctttttgcagtccaacaaacaaacgctcgccgcgaaccggaacatcctcacccgccatcaccaccgtcagcggatcgtgataccaccccagcggctgtaccactaactgtgtatagtgacctttcgggctggcctcaatgacctgtactggtagaggagaatccaggctggtgcggcggctaatatccacctcccacggacgcaggaacagatcgaccggcccctggtacgcgggcgtataacccagcggccagcgatgcgcgccaacgtgaaactgcccgccgcggacggtgcctgtcaggcggttcacctcgcccataaactccagtacgaagcgggttgccggttcacgccacacccgatccggcgcatcagcctgttcgatattgccctgactcatcaccaccacccgatccgccacttccgtcgcctcttcctgatcgtgggtgacaaagacgctggtgaatttcagttcttcatgtagctggcgcaaccagcgacgtaactctttacgtacctgggcatccagcgcgccaaagggttcatccagcagtagaatttgcggttccacggcaagcgcgcgcgccagcgccacgcgctgtttttgtccgccggaaagctgggcggggaagcgatccgcgaggtgcgccagttgcaccatctccagcaattgcgtcactttcgttttaatcgccgccgcagttgggcggtcgcgtcgcggcagcaccgtcaggccaaaagcgatgttgtcaaacaccgtcatatggcgaaacagcgcatagtgctgaaacacaaaaccgactttacgctcacgcgcgtgcaggcggctaacgtccgtaccgtggaaacgaatatgaccgctggactgatgctccagcccggcaataatgcgcagcagcgtcgttttgccggaacctgacggccccaacaaggcaaccatctggccggaaggaatatccagcgagatatcattcagtacctgagtgcgaccaaaggatttcttaattctggcgatctcaatgctcatgattttcctcctgttgcgcgcgtttttcctgattctccagacgccattgcaacatgctcttcaaaaacagggtaataatcgccattagcgtcaacaatgcggcggcggtaaaggagccgacggtgttgtagtcctgctccagtaattcaatctgtaacggtagcgataacgtttcgccgcgaatcgagccggacaccaccgacaccgcgccaaactcgccaatcgcgcgggcgttggttaacaccacgccgtagagtagcgcccagcgaatattcggcaacgtcacgcggcgaaacatttgccagccggatgcgcccagtaaaatcgccgcctcatcttcctgactgccctggctgagcatcactggcaccagttcgcgcaccacaaacgggcaggtgacaaaaatagtgaccagtaccatccccggccaggagaacatcatttgcaaattatgctcatccagccagccgcccaacgggccgttggaaccataaaacagcagataaaccagaccggccaccaccggcgagacggcaaagggaatatccagcagggtcagcagtagctgacgtccggggaagttaaagcgcgtcaccagccacgccagcagaatgccgaacaccagattcaccggcactgcgatcaaggcaatcaacaccgtcagccagatggcgtgcagcatgtccggatcggccagattttgcagtaccggcattaaccctttgctgaacgcctgcacgaagatgtaaatcatcggcaccagcaggataaacgccgaaaccagcatcccgacgccaatcagaaaccattttccccagttaatgcgggggacgtcgtatcgcttcaattgagtcacttccgccattaatgacctaccacacgtcgaccaaagcgactttgcaaggtattgatagagaacagcagcagcaaggatgccgcaaggatcaccgaggcaatggcgctagcggccgggtaatcaaactcctgcaagcgcacaaaaatcatcagcgaggtcacttctgttttccaggcgatatttccggcgataaaaatcaccgcgccaaactcgcccaggctacgggtaaaagagagcgccacgccggcaatcagcgcaggcgacagctcaggcagcacgactttgcgaaaactttgcagccgggtggcccccagcgtttgcgccgcttcttcatattccggccccagctcttccagtaccggctggacggtgcgcaccacaaatggaatactggtaaaggccatcgccaccgcaataccgagccaggtataggtcactttgatatcaaactgcgcaagaaactgaccgtagaaaccgttcactgagaacagcgaggccagcgttaaccccgctaccgctgtcggcagcgcaaacggcagatccatcagcgcatccagcaacgtgcgccctggaaaacggtagcgggttaaaatccacgccatcagcaggccaaacacgccattaaaaatcgacgctacaaatgccgccagtagcgtcactttataggcagccaccacctgagggttggtcacgacatcccagtattgcgcccagctcatctgtgagagctgcatcaccagcgcgctcaacggcaacagtaggatcaggcagacaaacagcaaactggtgccgaggcttaacgtaaagccgggcagcacgcgtcgggaagaaacggcaagcattacttacgccccgccgccaacagtttgtccagctcgccgccgctggcaaagtgcgttttcatcacttccggccaggaaccaaacttttcttccacgcggaacagttcggtctgcgggaatttatctgcttgcttgcccatgatttccgggttattcacgcggtagtagtaatgggtgatgatggtctgcgcctgcgggctatacagccagttcaggtaagctttggcggctttttctgtgccgttggcctgcacgtttttatccacccaggcaaccgggaattcagcaagaatgttcgttttcgggatcaccacttcaaatccctgggcttcatattgtttgcggatattgttcacttccgactcaaaactaatcagcacatcgcccagaccacgctcggcaaaggtagtcgtagcgccgcgaccgccggtatcaaacacttcgacgtttttcaggaactgggtcataaactgttcggttttggctttatcgccgccgtccacgttatccgccgcgccccatgccgccagatacgtgtaacgggcgttgccggaggttttcgggttagggaaaatcagcttcacgtcggaacgtacaagatcgctccagtcgtgaatatttttcgggtttcccttgcgcaccaggaaacccatcgtggaatagaatggcgaactgttgttcggcagacggctttgccagtcggcagggatcagtttgcctttatcatgaagaatctgtacgtcggtcacctgattgtaggtgacgacgtctgccttcagtccctgcaaaatcgccagcgcctgttttgatgacccggcatgagactgcttaatcgtcagcttatcgccgccgttatccttcgcccattgttgctcaaacggcgggttaagggcggcaaacagctcgcgggagacatcgtatgagctgttcagcagctccgttgcctgcgcctgccctgccagtaacagcattgctgccagcgtcaggggtctctttttcagtaagttaacggccattgcgcacccttataaatttaatgactttcttatggtcatcatatttataaccagcgctaaaggagtaacggttttatataccgtttgatgatttgaaagttgaaaagggaataagagaatccctccccacgcggcgtgaggaggagaccggcatcaatcagacgcctacgcttacgctttcaggcagggtactgccgccatcaatgacgttttgcgttccggtaagatagctggactcatcggaagccagaaatgccgccagttcccctacttccagcggatcggcaaggcggcgtagcggaatggcttttgccatttccgttaataccgattccggatcgtcagggttagactgacgggcaatgctttccgccatcggcgttcttacataaccggggcaaatggcattcacacgaataccggactgcgcatactctaccgccagcgatttggttaaaccgacaatggcggcttttgacagcgcataggccgtttcacccgggtccgccaccatatctcccgtgacggaagacatcatcacaatgcggccatctttacgtttaatcatctccggcaggacggctttggtgacgttccagacacctttaatattaatatcaatgtggaaatcgcgatcttcttcactcatatcgaggaagttgcccagacggcacacgccagcgttattcaccaaaatatcaattctaccttcagtctctttggcgcgcgcaaccgccgcctgcaccgaagcaaaatctctgacgtcagccttaacggcagtgcagcgatgcccgcgcccgcccagctcatccgccagtttttcaatctcatcggagatatccagcaagattaagttcgcgccgtggcgtgcgaatacgcgagcgatcccttcgccaatgccctgcgatgcgcccgtaatcaatgctgtcttgcccgtgagtttacccattttcaatgtctccttttgaatatggagtcttacactccattaacactgaaaatacagtaataacaaataagtgctgaggaatagctcactaattcaggtaaatattaggtaaaaaaatccccgcggaggcggggatgggcatttttatgctgttctgcctgatggcgctgcgcttatcaggcctaccaatcgtaggtcgaataaagcgtttgcgctgccatccgacagggttttaccttatagcgctaacaggcgatccagcgacggcgcaaaatagtagccgccagtcaccggtttggtgaagcgcagcatcgcgtcgcgtttaccgtcggtatcgccgaacatactcagaagctgctgttcgatattgtgcagacgtgcgcagtaagcgcagaaatagagaccatgagtaccgctggcggtgccgtatggcaggctctggcgcacaatcttcagccctttgccatcttctttgagatcgacgcggctcaggtgagatgttgccggacgcgcatcgccgtcaatctcttcattggcttctttggtacgcccgatcatcatctcctgatcgtgaatactcatccggttaagttgcttgagattgtgttcccaacgctgcacgaacacataactgccgccggcatccacgccatctttgatcaccgccacttcacggcgcgtctcttcgcccgccgggttctctgtcccgtcgacaaagccgctcagatcgcgttcttccacccaacggaaaccgtgaacttcttctttcacgtcgatacagtcgccgaaggcttccatcgccgcctgggcaacagaaaaattcacatcgtggcgcagggaaaggatatggatcagcacgtcatactgcgtggccggtgccagccctttaccataaggaataaaatctttcagttcttccgccccgacgccgccactcagggcacgccaggtattgttgccaaacgccacaacggccccaagatgggcgtccggaaatttgacttcgaaggtcgccagtttatcggcaaatgttctgctggccgcgcgcagggcgtccaggtcgcctttcacattggcttcaatccaaattgccgcacggcaatgttccggcaaaatgccactttgaacctgagacatgattcctcctgaaaatgagaatgccacgcagtcgtggcattaatggaggctattttaccttgtttttaagcgaagcggtttgttcaggcgcaaattaacgacgccagataattttgcgcacgtcccagttttttaagacgtcatcaggaggcattaagccttccggtccgctccactcgccggagaaaacatagctaatatgctgacttccctcggctttacattcgacgctggtatggctatcgctggaaaccggctcgcagtgaccaaacgctttgctgtaaaggtcgctaaacggcgtaccgattttgccccccgcggcggttgggatatcgctgtccagcacatcaatacggctcacggttccctgctcgccgttgatcaccatcgcgacactgtcgcccttcatcgcttcgaaaaagcgcaccacgttgccgttatcggttttcataccgctacgcaggcgataatcgccatctaatgcctctgcaatagccggctcttccagcggcgtggcggcggtcagcgctcccacgccttgctcagtgacttctgtcgaggaaccaaaccagttccatggatttgcggcagaccagttgaccgaggagagcgtcgagcagccggtcaccgccagcggcagtgcgagtaaagtcaaacgcagcgatttcatctcacttcctttcttttattaattaacgttggttggagtgcgggttcgccaaaaagtgccgttattctttctcaagggaaaaacaggcacgcaaacgttgattggttaacagccagatcagcgcgacgatgtccgccagcagcagcgccagcccgacgccgttgaccgggtcgccacccagccacatcaccggcagccagcacaacgacaccagttgagcaaggatcaggagtccgcgcagccagcgccacacaccaggaaccgcgtcacgccgcccgctgagtaaaaatgccactaccgccggaacgccgggcaacagccccagccaaaaattgtcatggtcgggataaaaaaagtttaacaaagtattaccctgtccacgggatgaaccggcaatgacaaagagtacccaggcgcgcgcctgaagtagcagtacgcaccagaacagaaacggcaggcgtaaacgtccgtgtacatcataatcggctggatgaaactcagtactcttcatcttcaatcaggcgtttacccaaacttagggcgtcagaatgctcataccccagacgttcatacatgcccagcacaacgtcgttatcatcgcgcaccataatttggattttcggacacccgcgagcgatgagttttttttccagccggttaagcaacgcattcgcaatgccgcgcccgcggaactccgggtgaacgcccaggtaatacgccgagccgcgatgcccgtcataaccgcccattaccgtaccgacgacttcgccgctaacttccgcaacgaggaacaagctgacatcgtgattcaccttgcgttcaatatccatttcaggatcgttccatggacgcagcaggtcgcaacgctcccagagggtgatcacctcttcgaaatcttcctggcgaaaaacgcgtatttccatggtattcgttgccttttcgggtggaaaaaccaagattatggcgcaaacatctgattcagccaatatctgacgcgatgtagcggaaaaaatggcataatggcgatgtgtcacgtattgaaatgaaaagtaaaacaattctcatcaccaaccgtcgtaacggattacgcgatacgatataacatcttgaacttaattttcacaactcaggccgtatgagcacttttaaactcctaaaaactctcacatcgcgccgccaggtactcaaaacaggtctggcggccctgacgctgtcaggtatgtcgcacgcagtagccaaagaagaaacgctaaaaaccagtaatggtcacagcaaacccaaaaccaaaaaaaccggcagtaaacggttggtgatgctcgaccccggacacggcggcatcgataccggcgcgattggccgcaacggttctcaggaaaaacacgtcgtactggcaattgccaaaaacgtgcgcgctattttgcgaaatcacggaatcgatgcgcgtttaacccggacaggggatacttttattccgctgtacgatcgggtggaaatcgcccataagcacggcgcggatctgtttatgtccattcatgccgatggttttaccaatccgaaagcagcgggcgcttccgtttttgcgctttccaaccgcggggccagtagcgccatggcgaagtatctctccgagcgtgaaaaccgcgcggacgaagtggcgggtaaaaaagccactgaccgggatcatctattacaacaagttttgtttgatctggtgcaaaccgatacgattaaaaacagtctgacgctgggttcgcatattctcaagaaaatcaaacctatacataaattacacagccgcactaccgaacaagcggctttcgtggtgctaaaatcaccgtcaattccgtcggtgctggtcgaaacctcgtttattaccaatccggaagaagaacgcctgctgggcacgacggcgtttcgccagaaaatcgctacggcgatcgccaacggcatcatcagttattttcactggtttgataatcagaaagcacacacgaagaaacggtaatcatgaaacccgatgcacatcacgtaaaacagtttctgctacgcctgcaggatgatatttgccaaacgttatccgctgtggatggcgcaaactttgtcgaagatagctggcgacgcgaagcgggcggcggcggacgcagccgggtattacgcaacggcgggattttcgaacaggcgggcgttaatttctctcacgttcacggcgatgcaatgcccgcgtccgccaccgcgcatcggccagaactcgccgggcgtagcttcgaagcgatgggcgtatcgctggtggtgcatccgcacaatccgtatattcccaccagccatgctaacgtgcgcttttttattgccgaaaaaccgggcgccgatccggtatggtggtttggcggcgggttcgatttaacgccctactacggctttgaagaggatgccgttcactggcaccgcaccgcccgcgacctgtgccagccgtttggtgacgatgtgtatccgcgttataaaaagtggtgcgacgactacttttttctcaaacaccgcaacgagcagcgcggcgttggcggcctgttttttgacgatttgaatacgccggatttcgaccactgcttcgactttatgcaggcggtcggcaacggttacacccgggcgtatttaccgattgtcgaacgacgcaaagcgatggtctggggcgagcgggagcgtaattttcaactttatcgccgcggtcgctacgtggagttcaatctggtgtgggacagaggcaccctgtttggtctgcaaaccggcgggcgcactgaatctatcctgatgtcgatgccgccgctggtgcgctgggagtacgactggcagccagaagcgggtagcccggaagcggcgctgagcgagtttattcaggtacgcgactggatttaacttatttataaagtaaaacaatgcaaacaaatacacggaaagtagtaaccagtgacgccaaatggcatccccatctgggtataagttttattggctgcctgcttgccattacactagaaatatattttgaagaaagaatattcatccctcatagcggaggggtgagcttcggtctgatcgtgcttctggttatcaatatggtgaccatccctgtggtcatggccctgatagcattactctgctttattattcatattccgcgtaaaagcgttaactgtatcttgctatgcctactgtcatgtattttgacgatagccggtttgtttatcgcctatccggttggccgttgaataaaagcaggctcgtagaaataaacgagttcattgtagataaagaattcggataaccgcccgctgccgttatcattagtaaaacagtacagtaagcactcgtagaatttgcagtggagcactaccgcatggacgagcgtattccttgtaaaaacccgcaatgctcacacttcatcctgccagcaacggctgcccgcacggagggctattgtatgccctgcgtccaggcgcgctatcggcaagtgcaggaagaatatatccggaaaaacagaaaaacgatcgacgcgttcagtggcattaccaaccctgttgaaatgcttaaactcgttcatgaaccccgggaacacgatccgttaatcgagtggattccctgccccattccgaccgatgagctttacaaaaagctctccgatgatgaaagccgcgacatggtcgattatgcagaagaattatttgattccggatggcaggaggaagctcaggaaattgcgctgtgcctggcggcatttacccaggccaatctggataatttcctgcgccaggtaataaatgaagaagaactggagctctcttcacccctaccttttcaccgtgcgccgcctaacgtacgcgacgcgcttttgcagaaggtggaaaccgatgacgaaaaccgtgacggcattctttgtgccctggcctggattggcgatgaggttgtcgttgagcattttaaccgctggcgccaggaaccacctgcgtggagtgcttcacttcatatcctccctcatcgctatgctcaccaggcgggatgggagctcactgaaaatggccgcaggcgcgatctttactttacgcaatgtacccatctggtaaaacaggcacctgaacagccggccgtttttcgcgccgttgcagaatatggtgaaaactgcccacactgttccctgccgctaatcaatctgtttgaggttgcgccgagcgccgtcggcctaagcacgcagggttggcccggtcaaattcgtattctgacctgtcagtgttgtacggcatataacaccgttttcgccaccgtcgatccacaaggccagccgcgatggtacgaaaaaaatgcgctctcgacgctggcggtggagaattccgctgactggataacgctaccgcttgatgttctgcaccccggggaatcccgtttgccgctattcgctgctgaaatatttttacccaccaccttctcacagctcggcggccatcccgcatgggttcaggatacagactatcctacgtgcccaacgtgcgcgcaaacgatgatgtttcttgcgcagctaagctatgaagatatcgaggaagaggaatatgcggaaggaatgctttacgggtttatctgcccctcctgccaaacaacggcaacgtcttatcagcaaacataaacgctcatcctcatgatctgatgacaaaactgttttgcacgttgtgcgcgcgcttccccggaggcggcgctggcgcgccttgtccgggctaccaaccacagacagcagcgaatccgtaggcccggtaaggcgccagctgccaccgggcaattcccgacacgcgcacgttatcagcaaccggagagcctccccatcaatatcaagcccattgccgcatccgttgatgcagcgtcaacgacggtttttcggcaaataattgctgataatcggtggcaaattgccccagatgccagaatccccactgcatcgcggcatctttgaccgtggcgctctgcgaccacgggctaatcagttcccggcgtactgcgtttaagcgaatacgtttcagccacgcattggggccaatgcccaaaatggcgtgaaacgcattttgcagcgtgcgacggcttacgtgtagctggttacataagtcgagcaccgtcagcggctccgacatattttccagcacatattcccgcgcccgcgacagtagcctacgatatccctgatggctgatgctttcggcgctatgaatcggcttcgcctcttccagcatcgtgcccatcgccagcaataaattatcactcaagaccttacgcaccgcaggttgatgcagagtttcaggactctcgctgaaggtggccagcgcctgctgcacaaagccccacagcgctgctttatgctgctcttttacctccagcgctagctggttacgcagcatatgcagcaccctttccgggttatgcaaaaacgtggcctgacgggaaataacatcttccgagataacgacgcccagaatggtgtaatcatccggcgtgctcagttcaaactcggtgcctcccggtcgggtggcaatctcggcgctgccgagcccctgcgcgccgataaatccctgttcgccgcgcgtcgccggaataccaaaccagaaagagtttggccaaaccagacacgactgacgcagcgccaggccggtgtattcacggaacacctgaatctcatcaagcaggatttccgtgaactcgccatgaaatttacccgggtgtaactgatcgtagatctgctgccaggcggtgatagtcagagcatgttcatagacatccgtcgtccgtcgctgatgaacattgtccacctcgactctgggcgtaagtttaacgtcttcgggtaacgcttcatgataaagatggtgcaaattcgctgtacgggtctttttcatgatcttctatgccggacgcccgccaggacgcccggccctccgacagattaatttttgatgcgatagcgactactgcgtttacgcaacgctccgtcagaaaagagttgttccagcacgtttctggcctgctccagcggccagccaaaatgcgcggcaacctctcccgccgtcattccctggcgtactgatgccagcagcgccaataacgcctcagcgaactcaggcgttgcgggtacctggggtgctttctcagtcggcgttgtcgcacgcgcaaacccgccaatcagccactgggtgtcctcttccggacgaccaatttctttgcgactaatcacacggcctgtgcgctgcgcggcagcgcttccggcatccagcgccgcacgacacgccgccagatcgccctccaccaccagcgtgagcctgccagggtcgagcacttgatgactgagcaaacgcacgttggccgctttcagcatggcatccgccgcatcgacggcggcgaccattccgtccacttccagtaatcccagggcattgatcattggcagcctccgttacgcacgctggacagggttacgggcgatatccagcacggcgtcggtaaaggcgttgcaggcggctttacacgcggcctggcttcccgttaagaacgcggccgaatagttggtttccgacggcggcggcacgtaagtcaccagctgaacgtcagcggatttcatcgccgcgtcaatgccgaatgtcgcttccagcggcggcgccaccaggtaggccattggatcgcccagcgcgatacctgcggtagacgagaggtacgagccggtacgcgaaaccacatgcgccaggaatgcggtattttccgcatcgttcgcccactggaacgccgcgccgttttcaatgctggcgaccattgcatccagaccggcgcgcacttccgccgggttcggtccgcccagcataatcaacacctcaccagcggtaggcgacggcccgtgagccgccccggcatagagggagcggccatagaccacttccaccatcgcctgttttgtcgcttcgtcagcggcaatataggtcacatcatcagaatctgccgtgatgagtccgagactacgtatatgtggcggtaatttaagttcccgcgcaaagccgtcattcacggaggcaatcacgcgcatggcagtcactgaaggtcgaattaaatctaatgcaggcatgatgtctccttaacgggtcatgttgatgccggacgctttctgctccagcatccgtttggccaaatccacaatcacggcggcggcttctactggcggcgtccccccctgatgaatgtttgaaatacaggttctgtcggcctcgacggtggtcgccacgcgcggggaatagaccgcgtagcaggaaaggctttccgactgccccagccccggacgttcgcctaccagcaggatgacgaccttcgcgccgagaatttcgccaatctgatcttcaatcttcacacggccatagcgcacaaagaacggcgtgccgacgttcagcccggcctgcttcagaccggcaagcaacggcggcaggatctcttcatagttggcggtgatcgcatccgtagagaggccatcggagaccactacctgcacatccgggttcatcacgcactgtgacttcagcgcgtcaatggcttccgggctcaggcgacgccccatatccgggcgcgtcaggtacaggtttttgtcgctgatctccgaacgcacttccagcagcccttgcgcttttacccactcttccggcacttctttgagcacggtatctttcgaacgggagtgatccgccaggaagcgcaacagcgcctgggtgcgcggacgcggcccggcacgccccgtacagacgcgtgccgcagtactgcgacgcagttcggtcagcacgtccgcacgatgtgggttctcgacgccaatccaggcttttgcctccgcggaacctaaatccagcgcgcagctttcggtcaccgtcggcgcggcgcactgcggctttgcgccttcctgcgttgacggcgcggcgggctgcggtacgtcctgtcccattgacgccatcacgctacgtacaatttcttcaatctgtttttgatccatggtgttatccccgcgtcatcagaagaacagtgacggatcgcccgcccgtttggtcagacgaccgtttgccataatgcccatcgtttccagccagcgttcaaactccggcgacggccgtaaattcagcaactgacggacggtggcggtatcgtggaaagcggtggtctggtagttgagcatgatgtcgtcgccgagcggcatccccatgatgtagttacagccggcagtggcgagcagaatcatcaggttttcgttaaggttctggtcggcgtcggcatggttggtatagcagcagtcgcagcccatcgagatgccgctcagcttgcccataaagtgatcttcgagaccggcgcggataatctgcctgtcgttgtagagatactccggcccgataaagcccaccacggtgttcaccaggaacggatcgtagtggcgcgccagcccgtagttacgcgcttccatcgtcacctggtcggcaccaaagttcgcgcctgcggagagcgcagacccttgcccggtttcaaagtacaggcagttttccccggcgatgcggttgaactccgcccccacagcccgcgcttcgtcgagcatggccagctcgacgccgaactcttttaagcccttctcgctgccgcaaatgctctggaaaatcagtccgcccggcgcgccgcgacgaatcgcttcgatctgggtggtgacgtgcgccagcacgcagccctgggtcggaatattgaatttatcgataacgccgtaaacggtgtcgagcacgcgggtcaggttctccacgtcatcggtcaccgggttaacgccgatcaccgcatcgcctgcgccgaaagaaagcccttcgtagatttgcgcggcgatactctgtacatcgtcacgggtatcgttcggctgcaaacggcagctaaaggtgcccggaataccgatggtggtattggcttttttgatcaccggcattttcttgccgccgtagatcaggtcagcgttggagcagattttcgctactgccgccaccacttcggaggtcaggcctttgcgggtaaacgcgatgtcgtccacggaggtttcatcgctcagcacgtattcacgcagttcgctgatgctccagtttttaatccggttataggccgtttcgttgacgtcgtcctgaatcaggcgcgtcacgcagtcctcttcataggcaatcaccggattgttgcggatatccgccaccgtcatttccgacagtacctgttttgccgctacgcgctcctgcgaacttgccgcggcaaccccggccagcacatcccccgaacgcagttcgttggctttagccagtacctcttttacatccttaaactgataaacattgccgaacaatgtggtctttagtttcataagtcgttccctcaggaaggaaatgcgagtgatttcaccgtcaccggcacaaccgatccgccaaaaagaggcgtaccaatgtcgatatagtctcccgcccgcacgaccacctcatcgatgaccgccagcggaagttgcggtaactgtgggcgcaataacatgcccagcgctttaccaaaatcctgctcggccaccaccagcaggggatgtggattgggataacgcgcgacaaaagccgtcagcgcgttgatgaccgtgagtaatgcggcgtaacgcaccggaagcgtggcgggaagcgccagcacgtaagcgtcggtttgcgggtcgagatcaagctggagaagcgcctgccgccaggcgttcaccagatcggcgtcatcctgcgggatcgccaccggcaggttgcgcagcggcagttggacgtcttccagccagatagtactgccggaaagcgagagcgtatgggcccccgcgccaatcaccgtggcgcgcacggtttgcgccggaaactgcacgttcatctcgcgcagacgcgggtgctcatgcagcgcggtcgccagcagcggcccgatatcagaaaagcagaacggatcggcaggttggttgcggtagcattcacctaccccaccggaaagggtgatcacctccggcgtaatatcggcgggcagcagcccggtttgcatcagcgattgcgccagcggcgagagcgcgccagtgataacctcgacgatgagatccgccatccgccgcgccacctgtcccaactgtgcggcagctaaggcgcgagcatcagtacccgaaccgaacacctcatcgataatcatctgccccggctgatgggcataaaccacgcgcccctgagcatcggtttccagcaggcgaccaccgacgttaaggcaggcggtgccgctgacttttcccgcgtcaaacagcgcgtagttagacgtgccgccgccgatatcaatattcagcacccggcacatccgctgctcagacaagctttgcgctccggcgccgtgaccggcaatgaccgattccagatgcggcccggcgctggcgaccacaaagtcgcccagcgactgcgagagcgccatgaccgccggacgggcgttgcgggttttggcgctttcgccggtgataatgatagcccctgagtccaccgattcaggcgcgatgcctgcggcctgatactgggccagaatcagcgctttaagttctacctctttcagaccgccctgcttatccacgggcgtaaagaagaccgggctttgccagctaatgtcgcgtttgatgaattcgtagcgcggcacctgcgacaccgccgcacggttaaccaactccaggcgcgagaagatcacctgcgtggtggtggtgccgatatcgataccgacgctcagtagctggcgagtgttcacgattgcgcctccgcttcggttttcacctgggcggcgtcatctttcggcaccagcatcatcgccacgccaatcgccgtcacgccgccgatcagcttgccgacaatcatcgggaagatcatggcgttcatgttggcagcggcgaagcctaaatggtcgcccagcgcgaacgccgcagagacggcaaatgcgcagttaatcactttgccgcgggtatccatctgcttcatcatgccgaacatggggatattgttcgccagggtcgccaccatgcctgccgccgcaatattattgacgttcagcagtttaccgacattcatcaacggtttttcaaaccagcgggtcagtaacagcaccatcggatacgcgccaagcagcacgcaggagatagagccgatcacttcaatggcgcgcatcacttcgccgggtttgtcgcctggcgccataaagatcgggtcgagtcccggaatcaactcccaacccaacaggaatttaaccaccgcagctgccagaccgatggtgatcagcgctaccagaaatttggcgaagatctggaaaccgttgatcattttttccgggatgaacttcagccccagcgctaccagcaccgcgacgatcaataccgggatcatgttcatcaggatcagcgcgaaggtaaactccactggctgaccattgatctgcacacctgagtacatggcgatcagtccccccgcaatgcagccaatgggaatggtgacgatacccgccagtacgccaagcgccaggtagcggcggtcagacggttcgataatgccgagcgccaccggaatggagaacacaatggtcggccccatcatcgacccaagtattaaccctgagtatagccacgccgcgacatcaccgccggccagctctttggcgaggaagaatccgcccatatcacaggccagcagcgtacccgcgaacatggatgggttcgcgcccagcatttcgtataccgggataataaccggccccagtacatgcgccagcaccggcgccagcgcggtcataccgaccatcgccagccccagcgcgcccatcgccataaagccctcttcaaactggccgccagacccctcgatactcttgccgaatttaccgaggaagcgcgccgacccgccgaactgcgacaggattctgtccacggcggcaatcagcataaagaacatcatgatgtacatgatgatttcgttaattcccatagcccctactccctgtcatttttgatttgtaaaccggataagacgtttacgtcgcctccggcattaacgccgtgttattgccggatggcggtgcgagcaccttatccggcctacaggcattacccggcagccgcgtacaggtcgataatctgtgcctgtgtggcggtgcgtgggttactgcgcagacaaatatcctccagcgcggcttgcgcccacgcgctgtagtgttcgggtttggcgccagcgtcagccagccgtttgctctgtcccacttcggcaatcagctcgcacaccgccgcaatcgcatcgcgatcgtccgatttcttattggttaacgcccgacctatttgactgaagcgctcgcggcaaaccatccggttaaagcccatgactgttggcagcagcatggcgttggcctggccgtgcggaatatgcagcgccgccccaggctggtgcgccatcgcatgacacagccccagaccggcgctggaaaaggccattcccgccatacaggaggccagcaacatattttcacgcgccgccagatcgtggccgtaacccacggctttcggcagcgatttgccaatcatcgctatcgcgccaatcgccaggctgtcggtaaacggcgtggcgttgagcgcgctgtaggcctcaatcgcatgcgtcaacgcatcgataccggtcatcgccgtcacgtttggcggaacgccttcggtcacggcagcatcaagaatcgccacgtccggcattagtgacgcgtgcgccagcacctgcttgcgcccgctgaccgcgtcgataatcaccgttacgttggtggtttcagaaccggttccggcggtggtcggcaccgcaatcagcggcagacgcgggcgtaatgtactgtgctcggtcatggcgctcagcgtctggtcagggttagtcaccagcagggcgaccgctttcgccgcgtccagcaccgaaccgccgccaaaggccactacgccgtcgcacgccgcctcacgcagttgcgccaccgccgcgcagacatcggtgatgcacggctcgccaggcggacacggccagaccgtcatcgccacgcccttcatcgccaggctgcgtgccagcggcgcggtcattcccgcctgatgcaggaagctgtcgaccatcacaaacagatggcttacgcctcgcgcttgcgcttcctgtccacaggcgccgagcgccccaagtccgcacagcgtgaccggcggtacgctgaacgttttcacccgttgcagattcagggtgtcgaatgcctgaaacagcgccgtctgtagttcagcttgcatagagtccctccgctttcgctctcccgctgttggctatcgccagcggggtcataaacaggctgtgctgcggcaaatgcacctgtaactccgggaaacgctggcgaaataacgcctccacgcccggctgcatacaggagccgcccgccagccataaatcagcaattccttgcccttcaatgtggcgagcaacgatttccgccatcttttcgtacaccggcttcactaccggccaaatctcctgcgcattgctgcgcttgtactgttccgcctcttccaggggaatacggcggttgcccgccagcgtcagggagatatggtgcccgccagtggcttcatcggcggagtaagtcaccttgccctgtttgacgatggcaatgccggtagtgccgccgccaatatccaccacgcctgcattatcaagcgccagcagatccgctaccgccgtcggttcatccagtacatggctgacttctaacccggcagactccagcacgttgatcgaaatacgcgggtcggtgcctggcggaaacgaggtcgccgcgtgggtaaagcggcagccgagctgctgttcaagggtgtcgagatggcggcgcacgagggtgacggcgccgaagaaatcccagacgatgccgtcacgcacaacgtcggcccagtcaaggcataccgccaccggctgggcgttgccgtcgaccaccatcgacaccacgtcgcaggtgcccaaatcgacgcccagccacagcggtgtatcgctggcggcgggcgtctggttacacagggccgccgctttttgcagtcttggggtgagccagagttgttcgtcgtgcgccatgagtcatcccttatacaatgcgaaacgcatccaccagcacgcatcgacgcagccgcacaaaggtacgcgcgctggtcaccccttcgccggttggcgtagtgatagtcatggtggtccagccttctccgcccaatccaagcccggcaatgcacggcccgtttttgacgaaaatgctggtgtcgatggcgttcgccatctggttcatgttgtcgatattgcgcgagtgcatcgccgccgtatggtggcaaccgccttcaagctgaaccgccagggcgatggcttcttcgacgttggcgacccgcaccaccggcagtaccggcatcatcatttcagtaacggcaaacggatggttggcgggcgtttccacaaacagcaggcgcgtttgatccgggacgttcaggccgatggctgcggcgatcttgcccgcgtcacgaccgacccagtcacggctgacggtgcctttgccgcgttcatcgatattcttcagcagcaccggctggagctgttcggcctgagcggcggtcagtttcaccgcgtgctgaccttccatcagacgcatcagctcgtcggcgacgctatccaccacaatcagcactttttcgtcggcacagatgatgttgttatcaaacgacgcgcctttgacgatggattgtgcagcgcgcggcaggtcggcggtctcatccaccaccaccgggggattgccggcaccggcggcgatcaggcgtttattagtatgtttacgcgccgcgtccaccaccgcttcgccgccagtcaccaccagcaggccaataccgggatatttgaacaaccgctgggcggtttcgatatccgggttcgccacggtgaccagcaaattttccggaccaccggcggcgaccaccgcctgattgaggagagtgattgcccgctgagagacctttttcgccgccggatgcggggcaaacacgacgctgttgcctgcggcaatcaggctgatggcgttattaatcaccgtcgccgccggattggtggacggcgtgaccgaggccaccacgccccacggtgcattttcaatcagcgtcaggccgttatcgccggtcagcacctgcggagataaacactcgacgcccggcgtgccgcgcgcctgcgccacgtttttggcaaatttatcgtcaacgcgtcccatgccggtttcgctgacggcaagttccgctaattctcgggcgtgtttttcgcccgcttcgcgaatggcatgaatggcaagctggcgcatcgccacgctcttcagcccctgctgggcccgttttgctgccgccactgcgtcatccagggaggcaaaaacgcccatctcatgaacagtactggccggctggctgctgtctttcattttcagcagtaccgctttcaccacctgttcaatatcctgttgattcatgatgttcaatcctatttatggaaaaccactttcccgccagccaccacttcatcgacgatgccaatgacgcacagatcgaccggtgataattcgctgcgatgcgcctggcgtgcggaactgccgctgaccagcagtacccactctccggttcccgccccgatactgtcgatagcgacggcacactgcccgtcggggttgccctgggcatcgatcatttccaccatcagcaatttgtcatgcgccagtccctgatggcggacggtacatacgatttgtcctgtgacgactgccagtttcatatccgcctccatggattgcccgttgggtcgtaggccttgaatctgcgcaccatcaggcaatggcgcgcattcatgccggatggcgacgctgcgcgtcttatccggcctaccatcaaatgttgctgtcgcctttgaagctgatcgggaacacttcttccagatcgccgtgcgggcgtggaatcacgtgtacggagaccaactcgccaatgcgctgcgccgcagcggcgccagcatcggttgcggctttgcacgccgccacatcgccacgcaccatggcagtacacaggccaccgccaatctgcttcacgccgaccagcttcacgcgcgcggcttttaccatcgcatcggaggcctcaatcagcgcaaccaggccccgggtttcaatcattcctaatgcttccatcgtgttttcctctcattaaaggggtccagaacgggaccgttcattcaaccagtgtgtgtaagctgcgttcgcggctcacgtcagcctggcgcggcacggctgccaccaacgccagttcgataatttcctgcacgctacagcctcgggagaggtcgtgaagcggcgcggcaagcccctgaattagcggcccaacagcgcgatagcctcccagacgctgagtgattttgtagccaatattgcccgcctccagcgacgggaaaatcatcacgttggcgcggccttgcagcgggctgtcaggcgctttttgcgcggcgacctccggcacgaaagcggcgtcaaactgcaattcaccgtccacaagcagttgcggcgcacgttcgcgaacgagctctgtcgcctgctgcacgttggcaacattggggtgacgggcgctgccgttgcttgaaaatgacagcatcgccacgcgcggctcttcgccggtaatggcccgccaggtgtcggcgctggcgagagcgatatccgccagctgcgccgccgtcggctgcggcactacgctgcaatcggcgaaccctaatgccggaccggcatactgcggcagcatcaggaaaatagacgacaatgttttgcacccgggttgcaggccaatcacccgcagccctgcgcgcagcacgttcgccgttgacgacaggttgcctgcgatacacacatcagcctcaccggcgctcaccatggcggcagcgaacatcagcggatcgctaagcttttccactgcgtccggcggcgttttttctccggcacgggcaagccagcgttgcgcaaaacgctggcgcatactcaggttgctgtgtgggtcgatgacctgaatgccatccatcgccatacgatgactcagggcaaactgacgcagcgcaaacggactggcgaccagaacggggcgagccagaccgtactgttgcaggtaatgcgccgctttcagcacgcgttcgtccagcgcatcaggaaagacgactctggcgggggcgcgtaccgccagttcgcgggcgcgttcaatgatcatggcttctctcccaaccgttgttgaatttgggcgaccgtcagcggatgtttcgccacgctcaaaatcatcatcacgtaaaccgtactggagagacggttcagcgcctgtaaaatgtccgggcgcaagacctcaaaactacgggtaataaacacttgtgcggcgagggtttctgtttcgcggactttggttcgcagcagattaagcagcgccgcatcgcgaccgtggctggcctccggcaccaggtgatcgtggtcgaggtagcgcagcggctggtgggaaaggcgatgcagctcatcctcgttcagtccgacgatagactgcgccgccagcggttcatctatagcgtcggcgcgcataatgttgcccagccgcgagcggatatcgaaaagccacggctgccagggttccgccagttcgatttgtagccacacggtcagcgcgatggcgctgtcgagcgcggcgcgaaagccgaggcgcgggtcgcttttggcgaccattttgtccgccgtcagatgggtcagcgtatcgggctttttcaccaccggctggcggcacagttcacagcaggcctgtgggtgcgtatcgctactggttaagccatgtaccggctgcggctgctgttcgtcatcatcgacaaacagccggccttgcggatccagaaacttaatgcgcagacggcgactttccagcagttcccgggccgagggcgtcagtcgtgcgtcagcgggcagatggatctccgatccttcgctgagcgtatgattcgctctgagccacgtttcggtgatgaaatcgttcatacggattgccagtttgcaggccaggcgacgtacagaaagcgcacggacgttggcgtgccaaattcaatgctggagcctttagggatgaacatcacatctccggctttggcaatcatggtttcgccttcatggcgtacgtgcagttcgccttccagcaccatgtcgatttcgtcgtagttcagcgtccacgggaaaaaggcgttgtcccactgcataaacccggcggccatgctgctaccatcctgctctgtaaccagatcggttaagccgacgcagtgcggttcggcgccgtcgaagcggccaaatttcacgctgctgccgtcaatgactttcacgccgcctttacccgtgacggaggtaaagctcggctgcatcgtccccagttccagcgactgcttttccttcagcactttttccatcaactgcgccaccaggctttcagtaaactgcccttccgggagctgcgcgatgatggcttcccgaatgcgctggctttcgcttttacacgcctgcgccgatgtggatgccggaacggactcgtcgcattcggtaatcgtgaagcccagtagttccgccacttcgcgagcctccggggtaataatgctggcgcgcagcactaccgacatcgcctgttcgccgcgggcgtgggccgcacgaatatcgttagctgtgataagttttttcacctgcctcttcctcctgttcactgagagccgccagataatccaccaactgccgcacgctttgcgggtcgtggccgttgagctcgaaaatcggctcccggaatccaatctcgcaaagcaactgccgcgtagcggcgacgtcggcatccggcatgtccgttttgctgataacggcgatatgtcgtttacgggttccaacatccaataacccggcaggtaagcgactttctttatcgtttgccgcgtggacataaatcagcgtgtccacatcctgcaacgtggtaattaaggcgtgataccaacggggatggctaaaatattcacccggcgtatcgatatcgccatgatcattaaattccacggcctgcgtttttctggcgagggaataatttccccgtaacgcgttaaaaagcgttgtttttccggcaccgaccgcgccgacaaaagcaatacgtttcattaccgccaccaattaactttttgttaactcacacagggtaaagtttaataatcgccccagcccgctgaccgtctgtaatagcgcttcttctactgcgccgacggtgccataaatcaccagcgcgccgctaaatctatcgagaaaaccgatgtgtacatccgcagccttcatcgctaaatcgccagcgatcatcgccgtttcccccggcgttaaagtcataatgccaatcgcgccagcatcgggaacgccgatctttttcgccagttcttcaccagggtgcgcaatgagatgcgccagcgtgacctgtttgcccggcacaaattcctgaataatgcgttctttattcattgctcaccgtctccactgaaactgccgtcatcgtggcaattttttgtcggagtaaataacaaaattcggcaaggtgatgtaaaaggtgaggtagatcactaagagaaagaaaataaaagtgacttctgtcgaaggtgttaacgataaatatcgtggtgcatcacattttcaggcgtcattctgaatttaagcctgttccgcaataaatactcaccgactattctttgtattactaccattgataaaaataatgcgtatcactcgatttgtgcatagtacagattcagtgaaataagtaggggtaagcgcaacaggttccagaatatccccacccgagcctttcatgccatggcgaagcccagcggcgcataaataaatatcctccggcatagccggaggtttttcagatgcgcctataaggctctcttaccagccgcgccctaacaggcgcatacgatctgacatttgcatcaaacttcgttacttacggcccgtaaacgggctgcccggatacgggatcgataattgctcacccattttatcctcttcaagctggtgctttatgtagtcctgtatcttcgccgtgttcttacccaccgtatcgacatagtaccctctgcaccagaactccctgttcctgtatttgaattttagatccccaaactgctcgtaaagcatcagactacttttacccttcagatatcccatgaaactcgacacactcatcttcggcgggatctccagaagcatgtgaatatgatctgcacaacattctgcttccagaattcgtacgtttttccattcacacaattttcttaatatgctgcctactgccctacgcttctctccatagaacgcttgtcttcggtatttgggcgcgaaaactatgtgatatttacagttccatcgggtgtgcgctaagctcttttcgtcccccattgggacccccttttgatttcttgttgaacttttgcagttgccagaccgcaagatgttttaacaaatcaaaaggggttttaataactggcttaaagctgaaagctttccggaacccccagcctagctgggggttttccatagacaaaaaagcgcaggagaacctgcgccagaagagagagtaatgcgttattaaagcggcgtggtttgcgcttcaactaccgctaacgccaccatattcacgatacggcgtacagaggcgatcggcgttaatacatgtaccggtttagacacgcccatcaggaccgggccgaccgtgacgccttcggaactggagacgcggagtaagttgtaactaatgcgagcggcttccatattcggcatcaccagaatattggcggctcccttcagcgggctatccggcatccggtcattacgaatactttccaccaacgccgcatcaccgtgcatctcaccgtcaatcatcagatcgggcgctcgttcgcgtacccgctcaagggtttcgcgcattttgctggcggacagcgaatttgaggaaccaaagttagagtgcgacaacagcgcgactttcggctcaataccaaagcggcgaacggtttccgccgccattacggcgatctccgccaactgttccggcgtgggatcttcgttaacataagtatcggcgataaaagtgttgccgcttggcagcagtaaggcgttcatcgcccctgccgtatgcacgccgtcacggtagccaaagacggctttcacgacgctgaaatgctcatggtagtcgccgatggtgccgcagatcatcgcatccgcttccccacgctgcaccatgatcgcgccaatggccgtatggttgccgatcatcgcacgctgcgcctgttcctgagttatcccgcgacgcttcatgatctggtaatactcgctccagtactctttgaagcgcggatcggattcattattcacgatctcgaaatcaacgcccgctttgatctgtagccccagtttctggatacgcatttcgatcacgctcggacgtccgatcaggatgggcttcgccagtcccagggttatcaactcctgggttgcgtgcagcacgcgcgcctcttccccttccggcagcactacgcgcttcggatctttgcgtgcctgcgagaagatcggcttcatgaacaggttggttttgtagacaaactcggtcagtttatcgatataggcatcaaagtcagcaatcgggcgcgtcgccacgccggaatccattgccgctttcgcgaccgccggagcgattttgacaattagacgcgggtcaaacggtttcggaataatgtattccggcccaaagctcaggtcctgatcgccataggccgaggccaccacttcgctctgttcggcgtgcgccagctcggcaatcgcacggaccgccgccagtttcatctcttcgttgatcgccgtcgcgccgacgtccagtgcgccgcggaagataaacgggaagcacaatacgttgttcacctggttcggatagtcggaacgaccggtacagatgatggcgtccggacgcacttctttcgccagcggcggcagaatttccggttccgggttggccagcgccagaatcattggcgcgcgggccattttcttcaccatctcctgagtcagcactttcgggcctgaacagccgaggaaaatatccgcgccgtcaatgacctcatccagcgtgcgcttgccgctgtcgtctaccgcataggccgctttggtctccgccatattcggctcacggcctttgtaaataacgcccttagagtcgcacaccacgatgttgtgcttttgcatccccaacgcgaccagcaggttcatacaagcgattgccgccgcccctgcgccggagacgaccatccgtacgtcggaaatatttttctctacgactcgcagaccattaagaatggcggccgtactgatgatcgccgttccgtgctgatcgtcatggaaaaccgggatgttcatgcgctcgcgcagtttctgttcaatatagaaacattccggcgctttaatgtcttcgaggttaatgccgccaaaggtcggctccagcgctgcgaccacattgataaatttgtccggatcaagctcatcgacttcaatgtcaaacacatcgatgccggcgaattttttaaacagaacgcctttgccttccatgaccggcttgccggccagcgcgccaatgttgcctaaccccagtaccgctgtaccgttggaaatgaccgcgacaaggttgccgcgcgcggtgtatttgtaggctgccagcggatctttttcgatttccaggcagggcgccgccacgcctggcgagtaagccaacgccagatcgcgttgggtggcaaggggcttagtcggagaaacctgaattttaccgggtaccggaaattcgtggaaatcaagggcgctttgttttaactgctcatccatcttgttgttcctttcacgtatcgttcaaaaagtgacgcggcctggtgcgccgcacattatcaccgtactgcgcaacacaaactttgaaggtctgcaaactatcacgacgcagcgcaagagtttgttatcaacttataacggtcatgttacctgcttataccagcaataccatgcctgtctgctatgctttttggttatgtagtgtatcaatctttcagaagtgtgaatcaacacactcatctaacactttacttttcaaggagtatttcctatgaaccagctagacggcatcaaacaattcactaccgtcgtcgccgatagcggcgacatcgagtccatccgccactaccagccgcaggatgccacgacaaatccctctttactgttaaaagccgccgggcttgagcagtatggtcatttgattgaggatgcgattgcctgggggaaaaaacacggcggtacgcaggaacagcaggttgcggcagccagcgataaactggcggttaattttggcgcggaaatactgaaaagtattcccggtcgcgtctccactgaagtcgacgcgcggttatcgttcgataaagaaaaaagtatcgagaaagcgcgccatctggtggatctctaccagcagcagggtgttgataaatcacgcattctgatcaagctcgccgcgacctgggaaggtatccgcgccgccgggcagctcgaaaaagagggtattaattgcaacctgacgttgttgttctcttttgcccaggcgcgcgcctgcgccgaagcgggcgtctatttgatctctccgttcgtgggccgaatttacgactggtatcaggcgcgtagtccgctggagccgtatgtcgtggaggaagatcccggcgtgaaatcggtacgcaatatctacgattactttaaacagcatcgctatgaaaccatcgtgatgggggcaagtttccgccgtactgagcaaatcctcgcgctaaccggctgcgatcgactgactatctcccctaacctgcttaaagagctgaaagaaaaagaagaaccggtgatccgtaaactggtgccttcctcgcagatgttccaccgtcctacgccaatgacggaagcggagttccgctgggaacataatcaggacgcgatggccgtagagaagctgtcggaaggtatccgtctttttgccgttgaccagcgcaaactggaagacctgcttgccgccaaactataaaccttgcatggagtgatttatgtcccgtaaagaccttgccaatgcgattcgtgcgctgagcatggatgccgttcaaaaagccaattccgggcaccccggcgcgccgatggggatggcggatatcgctgaagtgctatggaacgattttcttaaacataaccccaccgatccgacctggtatgaccgtgatcgttttatcctttccaacggtcacgcctccatgctgctctatagtctgctgcatttaaccgggtatgacctgccgctggaggagttaaaaaacttccgtcaactgcactctaaaacgccaggtcacccggagattggctatacgcccggcgttgaaaccaccaccggaccgctgggccaggggctggcgaatgccgtcgggctggcgattgccgagcgtacgttaggcgcacagttcaaccggccggaccatgagattgtcgaccactacacctatgtctttatgggcgacggctgtctgatggaggggatctcgcatgaggtgtgttcgctggctggtacgctgggactgggcaaactgatcggcttttacgatcacaacggcatctccattgatggcgaaaccgaaggctggtttaccgacgataccgccaaacgttttgaagcctaccactggcatgtcgtacatgacattgacgggcacgatccggaggcggtgaaaaaagccattctcgaagcccagagcgtaaaagataaaccttcgctaattatctgtcggacggtgataggttttggctcgccgaataaagccgggaaggaggagtcgcacggcgcggcgctgggcgaagaagaggtggcgctgacccgccagaagctgggatggcatcatccggcgtttgagatcccaaaagaaatttaccgcgcgtgggatggccgtgaaaaaggcgagaaagcgcagcagcagtggcaggaaaagtttgctgcttatgagaaggcttatcctgagctggccgcggagtttacccgccggatgagcggcggactgccggaggcatgggaatccgccacgcaaaaatttattaacgacttgcaggctaatccggccaaaatcgccacccgtaaagcatcgcaaaatacgctcaatgcctacggtcccctgttgccggaactgttgggcggatcggcggatctggcgccgagcaacctgactatctggaaaggttcgacctcgttgaaagaggatccggcaggtaattatatccactatggcgtgcgcgaattcggcatgaccgccattgctaacggcatcgcccaccacggcggctttgtaccgtataccgccacgtttctgatgtttgtcgaatatgcgcgtaacgcggcgcgtatggcggccttaatgaaagcccggcagattatggtctatacccacgactccatcggtttgggcgaagatggcccgacgcaccaggccgtggaacaactggcgagcctgcgcttaacgcctaacttcagcacctggcgtccctgcgatcaggttgaggcggcagccggctggaagctggccattgaacgtcagcacgggccgacggcgctgattctctcgcggcagaatctggcgcaggtggaacgcacgccggaacaggtgaaagcgattgcccgcggcggttatattctgaaagatagcggcggcaagccggatatcattctgatcgctaccggatcggaaatggaaattaccctacaggcggcggaaaaattgactggcgaggggcataacgttcgcgtggtgtcgttgccttcaacggatattttcgatgcgcaggacgaggcatatcgcgaatcagtgctaccggcacacgtaaccgcccgcgtcgcggtggaggccggtatagccgactactggtataaatatgttggcctaaaaggcgcaattatcggcatgacgggatacggtgaatccgctccggctgacaaactgttcccgtattttggctttaccgtggaaaatattgtagaaaaagcccgccgggtgctaaacatcaaaggctaaggcgagcgttagcaacacagactttgcacagtctgcagacctgttctgtaggctgtgcaaaattacttcgtagactcaggcgcatctgactgcccgatgacgacctcatcaatggatttatggcacatcaggcaaaaggccttttttttatgcgcctgcaatgttgaatcccacgccgctgatccgccttctttattcactttttctcttatcgccgccagccgatctatttcataataagcgctcaggcagccacaatgggggcataatacggggccattatttattttcatactatttcctgctgtggtgaggctatcgggtaaagtaacaatcctaccgtaacgtagcaatctctataccataaatgaaacctcaataggtgtatccctattctgaaaaggggataacaaccaggattcaacgcgtgatccacagcgtaggccaggcatccggcccgtgccagctatcgcagctcggttcttcggcataacgcaccagacgaaaacgatcgccatcataacgccagcgcgtctggataccgcagtcggttaacccccgccctttcgccaacgtcaccagctcgcgcgttttctcgtcaaagaaggcgttcatcaactccatgtcattactttcgacgccgcgattaaacggcagccgcaaacgtacggcgcgcgagacgagcgtttttttgcgtgaaactacccaggcgagatcaatagtgttataggcgccggcttcgcagttaacaatcaataacgctttatcatccgtcaacgcgctgacctgcgtctcgcgacgcagcgggtcaagcgaacaacgaatgccgtttacccgccatgctgcgtagtccagcagatcgtcgcgttcttcctcactcagcggtacgggcgttggattaatcacggcgatcccctttaatgccggtgccgggggcacgctgagcggcggttcgtttcctttttcaatccaggcggtttcgctgcccacacgtttttgttgcgcgtcgataaacagtaatgccgcttttaatcccgccagcgaaagcgtctgaacgccgttttttaaggtgatggcctgcgcatcctgaatcgtctgtaaaaatgcggtgatggtggcaggatcgccggtcatgagatgccagggcgacacgcgccagtgtggactgttgaacgaaagcggtttgccatccagcaataagcgaggcgcaattgcggcttctttagcgtcgggcggcgccaaaccgccgcggtcgatacgcagtaccgcatcggtacgcgccccggcgctgcggcttaatgtcatcaccagcccatgatgttcgccagtattgcgcgctacgcaaaaattttggttattgcaggtgacctgccagtcggaaaaagtccgttgcgctggcgcagcccacagtagctggaccggcaacaggccaaacagacaaaaaagaataacgcggtagcgcatgaacggaacaaccccagattcagaacaacacagctaaggcggtatcttccttgcgcgcctcagggttctcaatcagatttatcggattggtcttttttgtgtaaagaaatatatttcttttttttcagtccattagatgagacgtctgtaaatagttaagcaataacacggtcttaccgtcccgaatctcgcctgagcgcaccatttccagcgcccgggaaaacggtagttcaagcacctcaatctcttcgtcctccacgccgccgccgatgctggcacgctcgctatcatgatattcggcaatgaagaaatgaatcagctccgtgacgccgcctggcgacatataaagctcaaatatcttgcgtacctcaccaacgtcataccctgtctcttcaatggcctctttacggatacagacctccggctcgtcgttatcaagcaggccagcgcaggtttcaattaacataccgtcttgattaccgttgacccatgtcgccacgcgaaactggcgaaccagaaccacggtttttttagttgagttgtaaagcagaatggttgcgccattcccgcgatcgtaaacctcacgcttgtgacggataacctcgccattacgacgggtcaggtcataggtaatgttgcgcagagtaaaataattatcagaaagaattttatccttaataagcgtaatggtttgcgacatgctggctccagggtgtaaaaagagcattaatattacgccgtgaggtcggttttgtctgctgaagggttaatccttaatgccgactgaacggacgtacagccatatttttctgtcactgccatgaccatattctgcttctccgggccgcagagtccatgctcgcgatatgatttgacggccggagtgagactgagggaatcatcatgaaatttactctcgttgcgacggttctactgacgttttccctttcagcttttgccgttgagtatcctgtattgaccaccgcgagccctgatcaggtggggtttgatagccaaaaacttcaccgacttgatggctggattcaaaatcaaattgatgccggatatcccagcatcaatcttctggtgataaaagataatcatattgttctacaaaaagcctggggctatgccaaaaaatatgacggttccacgctgttagcccatcccattcgggcgaccactaacacgatgtatgatctggcttcaaacacaaaaatgtatgccactaacttcgcattgcaaaaactagtgtatgaaggaaaaatagatgtcaatgatttggtatcaaaatatatccccggctttaaggatatgcctggggataaaataaaaggcaaaaataaactccgcattattgatattcttcatcacgtcgcgggctttcctgccgacccacaatatcctaataaaaacgtcgccggtaaattattctcacagagtaaaagcactactctggagatgattaaaaagacaccgctggaatatcaacctgggtcgaagcatatctacagcgacgtggattatatgattcttggttttatcattgaatcgataacggcaatgccattagatcgctacgtcgaaaccaccatttataaaccgctcggattaaaacataccgtctttaacccgctgatgaaaggcttcacgccgccgcaaatcgccgcaacggaactacatggcaacacgcgtgacggcgtgattcatttccccaatattcgcaccaatacactatggggccaggtgcatgatgaaaaagcctggtactcaatgggcggcgtttcaggacacgccggactgttttctgacacccatgatatggctgtgttaatgcaagtcatgctcaatgggggcggctacggtaacgtgaagctattcgacgacaaaacggttgcgcagtttactcgccgctcgccagaagacgctacctttggtctggggtggcgcgttaacggcaacgcctcaatgacccccacgttcggggtattagccagtccgcaaacgtatggacataccggatggaccggaacgctgacgtctatcgatccggttaatcatatggcgattgtgattttaggtaacaggccgcactcgccggtagcaaatcctaaagtgaatccgaatgtttttgtcagtggattattacctgcggcgacgtatggctggattgttgaccagatatatggttccttaaaataaaaattaagagcctatctctgtaggcgttattggcgcagccagtttggacacggacagcgcgcaaaaaccggagcgtacacgtagtacgtgaggtttgactcgctacgctcgcccttcgggccgccgcaagcggcgttcaaaacgctaacgcgttttggcgagcactgcccaggaccaaaatggcaagtaaaatagccctaatgggataggctctaagaaggggttctgatagcgtcccttccttcaatttacactctattttcaatactaagattgtcctcatcaggcctgttaaacgtcgccccgacgggaaaatgtttatcgcagggcgttcagccctgcgagcgtcaacatttctgcaaacggagtaaggttagccaataagtttaagattttttatcactcaatcatttaaccgttccaggccttaaccggcctacaaatacgcttatttagctaaccagtcgagtatcccctgcgcagcatgtcggccttctgccatcgccgtcaccaccagatcggcgccgcgcaccgcatcgccgccggcgaaaattttcgggttggacgtctggtaacgaaactcgctctcgacgctggcggcaatacgtccccagttatccaccttcacgccatgcgattccagccacgacataccatgcggatgaaaaccaaacgccataatgaccgcatccgccggcatcacgaactcgctgtccggtacaggtaccgggcggcgtcgcccctgaccatccggttcgccaagccgcgtacgcaaaaagcgaataccgctggcgcgcccgtgcgtatccagcaccaactcaaccggctgaacgttaaattcaaagttcgcgccctcttcccgcgcgtttttcacctcttttttcgaccctggcatattggcctcatcgcggcgataagcgcaggtgacgttagcagcgccatgacgcagcgccgtacgtacgcagtccattgcggtgtcaccgccgcccagcacaaccacgttaaggcccgcagtatcaataaacggctcgtcaggcaacgccggaagccccatcacctgtttggtattggcgatgaggaatggcaacgcatcatatacccccggcgcatcttcattcggtaaatcagccttcatggaacgataggttccaaccccaacaaagacggcgtcataactctccagcagcgtctccagagaaatatctttccctacttcgcagttaagctcgaaacgaatccccatcgcgctgaagatttcccgacggcgcgccagcagagatttatccagtttgaaagccggaataccaaaggtgagtaaaccgccgatttccggatggcgatcgtagacggtggcgcttacgccatggcgcgccagcacgtcagcgcaggcaagacctgccggccccgcgccgataatcgccacgcgcttatcgctcttctgtacgtccgacaggtcgggacgccagcctttgctcagagcgcgatcggagatatagcgctcaatgttgccgatggtaaccgcgccatactcatcgcggagtgtacacgcgccttcgcatagccgatcctgcggacagacgcgcccggtaatttccggcagacagttggtctggtgggaaagctctaccgccgcatcaatatcgccggctttcaccagttcgatccactggggaatatggttatgcagcggacaggtccattcgcagatactgtgttccccgcatgtgaggcagcgggacgcctcacgctccgcctgcgcggcgcgaaacggcagataaatttcctcaaaggtggttttacgcgcttcaatcgccagtttatccggttcgccgcgcggcggcgtcgcctgcatacgctcggctttgctgcttgctgccccactgtgttgtgtatccacggtatgccaggggcgaatctcctgccgggcggtacgcagccgtcgcgttttagccagacgggtcaacgagtcttcggtgaccagttgcagcgcatccgccgggcaattttccacacaggccggcccctgttcacgtccctgacacagatcgcatttatgcgcgctggctttgaactggtttggcgcgacgggcgtcaataccatctgcatggtgccgaatggacaggcgacgacgcaggatttacagccgatgcacttctgcgcattgacctgcacgctgtcgttaatatgcgcgatcgcgccgttcggacagctacgggcgcagggcgcatcttcgcaatggtgacatgtaaccgcgctgcgctggtgctgatgtttaatgacagtaattcggggctgatagcgctgtgacgtcaggacatgtcgctcatcattgtgagccattacgcaggcgacctcgcaggcatggcagcccagacactgctggctattggccataataaaacgattcatggcgtccttctgttttggttgcaaaaaccttattctttatatgagcattgttattaactgacgaaggcggggtcggcaatgttcatctgcccaggaagcacaactatctgtccagaacctgtggcagatcaatttatttcaaagcaaatgaaattgcggttcagctaaatgcggggagtaccagtgtgacggttaaacgcccggtctcggccagtctggctaaggcttttttctatattgtgctgttgtctattctgtccaccggcagcgcattactgacgctgaccagcagtttacgggatgccgaagcgatcaatatcgccggttcgctacgaatgcagagctatcggctgggttacgatctgcaaagccgtagcccgcagattaatgcgcatcgtcaacttttccagcacgcgctcaactcgccggtactgcaaaatctcaacgcctggtatgtgccgcaggcggtaaaaactcgctacgagcgcctgcacgccaactggctggagatgaatagccgcctacaggacggcgacattgcctggtatcagaccaatatcaacaattacgtcaatcaaattgatctcttcgttctggcgttacagcattacgccgagcgtaaagtcatgctggtcgtcgccatatcgctggcgggcggtatcggcatatttacgctggtcttttttaccctacgacgtattcgccagcaggtcgttcgcccgctgaatcaactggtcaccgccagtcagcgaattgaacatggtcagttcgccccgctgccgctggataccagcttacccaatgagctgggattgttggcgaaaacgtttagccagatgtcgagcgagctgcataaactttatcgttcgctggaagcctcggtggaagaaaaaacgcacgatctgcacgaagcgcaccgccgcctggaggtgttataccagtgctctcaggcgctgaataccagccaaatcgacgtccactgttttcgccatattttgcaaattgtccgtgaacatgacgccgcttggtatctggagttaaccgtgggcgataactggcggattagcgaaggcacgcaaagccccgacctgccgatgcaaatgctgccagtgacgatgcaggacacggtctatggcgaactccactggcaaagccccaacgttaatgcctctacgccgctgctgaacagcgtctccacgatgctggggcgtggtttgtactttaatcaggcgcaaaaacacttccagcaacttttgttaatggaagagcgcgcgacgattgcccgtgagctacacgattcgctggcgcaggtactttcttatttacgtattcagttaacgcttttgaagcgcgctattcctgaggataacgccggcgcgcaaagcatcatggcggatttttccagagcgctgaacgacgcctaccgtcagcttcgcgagctactcaccacgttccgtctgacgttacagcaggccgatttaccctccgcattgcatgagatgctggaagatttacagagtcagaccccggccaaactcacgttggattgccgtttacccacgctggcgctggatgcgcaaatgcaggtgcatttgttgcaaattgtgcgtgaagcggtcctgaacgccattaaacacgccaacgcgagcgaaatcgccgtgagctgcgtcaccgcgcctgacggcgatcataccgtttatattcgcgataatggcattggtatcggcgaaccgcatgagcctgccggacactatggtctgaatataatgcgtgagcgcgcggagcgccttggcggcacgctgaatttttcgcaaccctccggcggcggcacactggtcagtatcagttttcgctcctccaacaaggaagagagtcagttaacgtaaagaacggcaaatcgccggaaggccagatgtcaggctttccggcgttggcacaaaaagtatgctgtaaaagcgcatgataatttacattatctcctttatttctccacgtttggctcgtagcttgccgctacagtgaagcagttcaaatctataacgatatgtagaaacacgaggtttccctttaatggcgaatttttttatcgatcgccccatttttgcctgggtgctggctatcctgttgtgtctgacaggggcgttagccattttctctttacctgttgaacaatatcccgatctggcgccgcccaacgtacgtattaccgcgaattatccgggagcgtcggcgcaaacgctggaaaataccgtaacccaggttattgagcagaatatgacgggcctcgataatctgatgtacatgtcatcacaaagcagcggaaccggacaggcgaccatcaccctgagctttattgcgggaaccgatcctgatgaggcggttcagcaggtgcaaaaccagttacagtccgcgatgcgtaaactgccgcaggcggtacaggatcaaggcgtcacggtacgcaaaacgggcgataccaatattttgaccatcgctttcgtctctaccgacggttctatggacaagcaggatatcgccgactacgtcgccagtaatattcaggacccgctcagccgcgtcaacggcgtcggcgatattgacgcttatggttcacagtactctatgcgtatctggctcgatccggccaaattgaatagttttcagatgaccacgaaagacgtgaccgatgcaattgagtcgcagaatgcgcaaatcgccgtcgggcagcttggcggtacgccttcggtcgacaaacaggcgctgaacgccaccattaatgcgcagtcattgctgcaaacgccgcaacaatttcgcgatatcaccctgcgcgttaatcaggacggttccgaggtcaaactgggcgatgtcgccaccgtggagctgggggcggaaaagtatgactacctcagccgttttaacggcaatccggcttccggtcttggcgttaagctggcctccggcgcgaacgaaatggcgaccgcgaagctggtactggatcgcctcaacgagctggcgcagtacttccctcacggcctggaatacaagatcgcgtatgaaaccacctcctttgtcaaagcctcgattatcgatgtggtcaaaacgttgctggaagctatcgcgctggttttcctggtgatgtatctgttcctgcaaaactttcgcgccacgctcattccgacgatcgccgtgccggtagtattaatgggcaccttctccgtgctttacgcgtttggctacagtattaacacattaaccatgttcgcgatggtgctggcgatcgggctcctggtcgacgatgccatcgtggtggtggaaaacgtcgaacgtatcatgagcgaagaagggctcacgccgcgtgaagcgacgcgcaaatccatgggacaaatccagggggcgctggtcggtatcgcgatggtgctgtctgcggtattcgtgccgatggcgttctttggcggtaccaccggggcgatttatcgtcagttttctattaccattgtctcggcaatggtgctgtcggtgctggtcgccatgatcctgacgccggcgctgtgcgcaacgttattaaaaccgctgcacaaaggcgaacagcacgggcaacgcggatttttcggctggtttaaccgtaccttcaatcgtaatgccgaacgttatgagaaaggcgtagcgaaaattttgcatcgcagcctgcgctggattctgatttatgttctgttacttggcggaatggtgttcctgtttttgcgcctccccacctcctttctgccgcaggaagatcggggcatgttcactacgtctatccagctaccgagcggttctacgcaacagcagaccctgaaagtcgttgaaaaggttgaaaactattacttcacccatgagaaagacaacattatgtcggtcttctcgacggtaggttccggccctggcgggaatgggcaaaacgtcgcgcgcatgtttgttcgcttgaaagactgggacgcgcgcgatcccaccaccggctcctcgttcgccattattgagcgggcgacaaaagcatttaaccagattaaagaagctcgcgtcttcgccagcagcccgccggcaattagcggtctgggcagctccgccggttttgatatggaattacaggatcacgccggagcaggccatgacgcgctgatggccgcacgagatcaactcattgagctggccgggaaaaacagttccttgacccgcgtgcgccacaacggcctggacgacagcccgcaactgcaaattgatattgaccaacgaaaagcgcaggcgctgggcgtatcgattgacgatatcaacgacaccctgcaaacagcctggggatcgagctacgtcaacgactttatggaccggggccgcgtgaagaaggtctatgttcaggccgcagcgaaatatcgtatgttgccggatgatattaatctttggtatgtccgtaacaaagacggcggcatggtccccttctccgccttcgccacctcgcgctgggaaaccggatcgccgcgtctggaacgctataacggctattcggcggtagaaattgtcggagaggccgcgccgggggtcagtaccgggacggcaatggatgtcatggagtcgttggtgcatcagctaccgggcggttttggcctggaatggacagccatgtcttaccaggaacggctctccggcgcgcaggcgcccgcgctgtacgctatttcgctattagtcgtcttcctgtgtctggcggcattgtatgaaagctggtcggtgcccttctcggtgatgctggttgtgccgctcggggtcatcggcgcgctactcgctacctggatgcgcgggctggaaaacgatgtttacttccaggtggggctgttgaccgttatcggcctctcggcgaaaaacgcgattctgattgtggaattcgccaacgaaatgaatcagaagggacacgcgctgttagacgccacgctgtacgccagccgccaacgcctgcgaccgatactgatgacttcgctggcgtttatctttggcgtattgccgatggccaccagcaccggggcaggctcgggtagccaacatgctgtcggaaccggcgtgatggggggaatgatctcagcaaccgttctggctatcttctttgtacccctgtttttcgtgctgatacgtcgccgcttcccgctgaagccgcgcccgaaataagatcccggccagcctgatacgaggtgtcgggcacaaaaaaggcgactttcgttgagtcgccttttcttatcccctatgggagcgcggtgccttccaggcatttatttacgaagcatgacttcgataaaatctttccagttccccagttcacgttcaatcataatagcctctcttattattatgggtattctacgtagttagcggtatagagagaagttcatttaaccgattgttgcgatatcctctggttatgctgtctatgatattactatggcgctgtagccataaattttatgtgacttactgcaatatttagcaacattaataccttttctactactttatcaaattgggttaaaaaacaaacaattgcatatgcacaaaataggatttataccgcgaagtataaacaagccacatctggaacgttttggaatcattattcacattcactcaacaatgttatattgattgccgatcagcgctggataaataaccataaacggccacacttattatcccgcagacgatactattgattatttattcgaatttcgcgttaaaggattcaatatgattaccctctatggcattaagaattgcgacacgatcaaaaaagcgcgccattggctggaggaacatggcattgattatcgttttcacgattaccgtgtggatggcatagacctccctcttcttaatacctttattgccgaactcggctggcagcctttactgaatacgcgcggcacaacatggcgcaaactggatgaaggccaccgcagcgggattaccgatgccgactccgccgctgctctcatggttgaacagccggcaatcatcaaacgcccattgctctgcgcgcccgggaagcctatgctgcttggtttcagtgaatcccgttatcagcagttttttgatgaggtgtagtctatgtcgtgcccggttattgagctgacacagcaacttattcgtcgcccctccctgagtccggatgacgcaggctgtcaggcattaatgattgaacgcctgcgtaaaatcggttttaccattgagcatatggattttggcgacacgcaaaatttttgggcatggcgtgggcgtggcgaaacgctggcgttcgccgggcatactgacgtcgtaccggctggcgatgtcgatcgctggatcaatccgccgtttgagcctacgattcgcgacggaatgttgttcggtcgcggcgcggcggatatgaaaggttcactggcggccatggtggtggctgctgaacgttttgttgcgcagcatcctcatcaccggggccgcctcgcatttttgattacctctgatgaggaagccagcgcaaaaaatggcaccgtaaaggtggttgaagcgctgatggcccgtaacgagcggctggattactgtctggtcggcgaaccttccagtactgaaattgtgggcgatgtcgtcaaaaacgggcgtcgcggttctctcacctgtaacctcactatccatggcgttcaggggcacgtcgcctatccgcatctggcggataaccctgttcatcgcgccgcgccttttcttaatgaactggtcgctatcgagtgggatcggggcaatgactttttcccggccaccagtatgcaggtagccaatatccaggcaggcaccggcagcaataatgtcattcccggcgaactgttcgtgcagtttaacttccgtttcagcacggaactgaccgatgagatgatcaaagagcgggtacatgcgctgcttgaaaagcatcagctacgctataccgtagactggtggctttccgggcagccgttcctgaccgcacgcggcaagctggtggacgcggtggtaaacgccattgagcactataatgaaattaaaccgcaattactgacgacgggcggtacgtccgacggacgttttatcgcccgtatgggagcgcaggtggtagaactggggccggtgaacgccaccattcataaaattaatgaatgtgtgaatgccgccgatctccagctactggcccgtatgtatcaacgcattatggaacagctcgtcgcctgatgagcgttccggtaagaggaaataagcatggactggctggcaaaatattggtggattctggtattggtgtttctggtaggcgtactgctgaatgtgatcaaagatctcaaacgcatcgaccataagaaattccttgccaataaacctgagctgcccccgcatcgcgattttaacgataagtgggacgatgaagacgactggccgaagaaagatcagccgaaaaagtaaccggatatcatgccggacaggtatcgctatccggcatggtccccaccgccgggcattacgtcgcgcaaactctgcgttcgtccggcatccaacgcaattagcgcctgcgccgcctgcgcacgctgcaacgccagcagagctttacggcctgaaatgcgtagccgggcgcacagttcggcatcgctggctttttcttccagccgccctctcagcgccggtaatggcaatgcgctgtattgcagtaaacgatgcaggcaacctaacgatgtcagtagcggacggtgcgcgaacgcaaaaccgaccagctcacgccagtcttcatcattaagcgcctgttcgcgcaacgccgccagcggtatcgcctcgccgttccactgcgtcaggatatccgcatcgcggcgcaaacgccggtgttcctgctgcgccagccgttttcccgcgtcgctcagcggcaataacgccatcgccgtatagcaaccgctgctcgcctcccgatggttgcccatccgtaccagtacaaagccgcagcgttgccagaaacgccacagcttcggcgtatagccgaagctgacggaaagataatcacactgcgccgcctgcatgcacgcgcaggcaatcaactgctgaccgatgccttcacgctggcgagcggggtgcactgcgatacggcttacgcgacgcccaaccagcgtcgcggctaaagggtcgctaccgtgcgccgccagcgactgcgccaccagattcccacgcggccgccggaaaccgcaccatacagcctgactgagttctgcggataacccgccctcttcgaccagccagagggcgcccgccacacggttattcgccgtagcctgcaagaaatgctgtcctggcgcatccatcattcggcgcagatccagcggcgaagtacgatagtgcgcccccgacagtaactgatacacagccctcggcaacgcgggcgtattcacccaggcctgttggtaaaacgccgagatttctatcgcgccatgtggcgcctgcgcaaacgcttcatcgtcgaatatcagcgcctcgctgacgatattttccagcgggcattctggcgcccagcggacaggctgacgaagcgtgaagcggtgaagctgcggaaaacgggcgcaaaacttaagtaaaaaaccgcgtccggtgccttcgtagccctgaacggtggtggtgagtagtatgcggggaaagcgcgaaaccagttgcagcagcagcggcgtggggattgccgccgcctcgtcaaccaccagccagtcggctcttgccccgctcgccagcaacgcatccggcgccataaagcagaaccgctcaccggcaaacgctgccaggatatccgttgccgttttcgccggtgcggtcacgatagccgtgcccgccatccgggagatgaattgcccggccagcgccgatttgccgcgcccacggggggcaatcaccgtcgccacgccgggcggcatttcacgtaaacgcgataagatagccgcctgctccggctgcggctcgccggtggcgggtcgccagcattcacgggaaggataagatggccagcaaaacggctggcgctgtcgccaaagcagcgtttgcggatcgcgggagagagtccgtttaagatgctgtgcaaactgcggtgtggggataggctgcgcgcagtcgctccagcgcagtgaatcggtatcaggcctgctttcccacgtctcgtacggcggcatcagcagaagcagccagcttccggcctgcaaggtcccgctcagggcggcaaacgctgcggcgtcaaagccctgccaggcatcaaatatcgcatgacggaattcacggcccagcagcgtttgtaacgcctgtggcgtacagcacggctgggcgggcgcgtcaggcgcgacccacagccagtcaccgggcaatgcagcgcgtatcgcctcggcccgcttccggcaccacgccgcatcgccgctgatgaccagtaaacggcgaatgccttcctgtgtcatttgcgacgttaacgcctgtagcgcatcgatatcagacatccctgccccggtttatcaaaagtttttgccaaacgtattacattgcgccgggtcaccgctgtcaaatccacgcttaaaccagctgtagcgctgttctgaggtgccgtgagtaaaactatccggcacgacgcgcccctgcccctgttgctgtaagcgatcgtcgccgatagcctgtgcggcattgagcgcctcttccagatcgcccgcctccagtacgccttgctgctgcatactgtgtccccacacgccggcaaagcaatccgcctgtagctccatgcgcaccgaaaggcgattcacctccgtttgcgacgcgttttgctgcaactggcgtactttcggctcaatacctaacagtttttgtacgtggtggccgacttcgtgggcgatgacataaccctgggcaaaatcaccgtccgcgcccagcttatttttcatatcatcgtaaaatgagagatcgatataaacggtgccgtccgccgggcagtaaaacggccccatcacggactgacccgcaccacagccggtgcgcgtcataccacggtacatcaccagttttggctgctgatagccgcgccccattttttgaaagagttgaccccaggtatcttcggtcgtcgccagaatcaccgaggtaaattttgccgcttcatcatcattggggcttatcgaacgcgtcgactgctgctgcgaaaccggctggccggtcaacagaccggttaaatccaccccatagtaccctgcgaccaacaccaccaccaacagaatgatgccgccttttccgcgcggaagacgaaagcctgggccacccagcgaggggccgcctggccgattacgtctgtcctctacattgttgctttcacgacgcccttgccagcgcataatcacctcattctctctttgttatacagatgatcgtaggcggtcaggcgcaggattaccacaggtaaacgctatcagaatgaggaaaggatgataccggagagcggttgccccccggtcagaagcggaattaatctaatttcacgcccaggcgatgcgcgacggcttcataggcttcaatcagaccgcccaggctctggcggaagcggtctttgtccattttgtccagcgtctctttatcccacaggcggctaccgtccggcgaaaactcatcgcccagcaccacttcgcctttatacaggccaaactccagtttgaaatccaccaggataagacccgcgtcatcaaacagttttttcagtacgtcgttggctttgtaggttagctctttcatacgcgccagattttcctgacttacccaaccgaacgtttcacagtaggaactattcaccatcgggtcgtgcagcgcgtcgtttttcaggaacagatcgaatatcggcgggttaagctccatgccttcttccacgcccagacgcttgaccagcgacccagccgcacggttgcgcaccacacattcaaccggcaccatctccagcttcttcaccagacactcggtatcagacagcaaacgttccatctgggtcgggatgcccgcctcggccagtttggtcataatgaaatggttgaatttgttatttaccatgcccttgcgatcaaactgttcaatgcgcgcgccatcccctgctgacgtatcattgcggaattcgagcaccaacaggtccgggttttccgtgctgtatacggttttcgctttaccacgatacaactcagcttgcttttgcatctttaacactcctgggtgtgaattaacgataagtattcatttcctgctacgcctgccggagacgccggcctgtaattgtggtgcgaaatagcggttaaatcgcgtttttgtaccgacgcacacgtttgcgtatcttatcagaaaaaagggccggattgctccagccctgttaaattacttgttgaacgctgcctggaagacggcaaccagcgcgtcgttctggctttgcgtcagagtatgccccttaggatcgataaactgcaagctgctgcggttatctaaatcgccaacctgcaatttatagtctccggatgccaggcccgggtcgctagcgcccagatcccgccagtcgctgtcagacaacggtttgtacgttaccgccatgctgccctgagagcgagtgctgtcggtgactttcatgcccactttttccagcgcggccgggaggcgctgccacacgaggttgaacggaccgcgaacgaccagcataggtaaaccggtatcatcagcggcgctctgcacatccatcgttgcggcggaacggttctgcgcggcatttgccgcatccgtagcggtcttatccagaccggcggaaatgacgttcatcatttccgtgctatagcgctgcagcgacgccgcgtcagcgaccggcttgccagcctgttccagattaaccagttttaccgttaccgcctgctgatagccctgcggcttcaccgagatttgataacgtccacgatactgttcgtcttcatccaggcgattccagttcacccaatcggtcgtcagggtctggctggcatcgtcacgtttttcaatcggataatttttcgcctgaatcacgctgacgacttgcggccacagcgtgctgctccggccattttccaccaatagcgtagcggtatcgccagagaactgggtacgcgcgccgctcactaacgctaacggctgcgccggcggacggatatccaacgccttaccaaccgcgccgctccccttcgtgaccggaataacgtagtcgccggtcgttatcggcaggatcattcctgccggggcgtgaagttcagcaagcggcgcggcatccagataggattcatcgccgcttacctggcgcttgtagcgcgaatcggaactacaggcagcgagcagcaaaacaagcgaaacacccgcaaccttcgccaggcgcgacttttgtactgagtaagccatcaaatctccctaaactttacagcaggccagcatgctgaagcgctgctttgacgatgtcacgaccatggtccgtgataggcgtcattggcaggcgcagcgtgtcggtcgccacaagacccaatgccttacatgcccatttcaccgggataggattgggttcgacaaatagtttgttgtgtaacggcatcagacgctggttgatagcgcgcgcctcggcaaattgcccttccgccgccagtttgcacatgtcagccatctcgcgcgccgctacgttagccgtaacggaaatcacgccatgaccacccagttgcataaagtccagcgcagacgcgtcatcgccgctaagcagaataaaatcgtctgaaaccagctctttgatctggtgaacgcgggttaagttccctgtcgcctctttgatagcgataatattttttatttccgccagacgacccacggtttccggcaacatatcgcaaccggtacgggacggcacattatacagaatttgcggcaagtcagtgtgttccgcgatggctttgaaatgctggaacaaaccttcctgcgtggggcgattgtagtacggcgttaccgtcaggcagcctacaataccgctatcgttaaaacgctgcgtcaggctaatcgcttccgcggtcgcgtttgcgcccgtgccggcgataaccggaatacgtccgtcagccagttccagcgtcatcatcacgacatcgccatgttcatcatggcttagcgtggcagactcgccggtagtgccaaccgaaacaatcgccgaggtaccgttggcgacatgataatcaatgagttttttcaggcaagacctactgacgttacctttctcatccatcggcgtaacaagcgcgacaatacttcccgtgaacatgggccatcctctgtgcaaacaagtccctcaatggtacgtttggtatggcaataaaagcaagcgaccaaagccgttctgattgttgtatgcaggttttttttatggtttccttaagattacctcaccgctcaaaggaataactggtttgacaccgtcatcacaacactatttggttatcactgcgctgggcgccgacaggcccggtattgtgaataccattactcgccatgtcagcagttgcggctgtaatatcgaagacagccgactggcgatgctgggcgatgaattcacgtttattatgctgttgtccggcacgtggaacgcgattaccttgattgaatcgacattgccgttaaaaggcgcggagctggatctgctgattgtgatgaaacggacgtccgaccgcccccgcccggcaatgcccgcgacggtatgggttcaggttgaggtcgccgactccccgcatttaattgagcgattcaccgcgctgtttaatagtcatgaaatgaatattgcggagctggtctcccgcacgcagccggctgaaggtgataaagctgcgcaattatttattcaaatcaccgcacatagcccggcgtcgcaaaattccgcaaatattgagcaagcctttaaagcactatgtacagaactcaatgcgcaaggcagtataaacgtcgtcaattactcacaacatgatgaacaggatggagttaagtaatgaatccactgaaagccggtgatatcgcaccgaaatttagcttgccggatcaagacggggaacaagtaaatttgaccgacttccagggacagcgcgttctggtttatttctacccaaaagccatgacacccggctgtaccgtgcaggcctgcggcttacgcgataacatggacgagctcaaaaaagcaggcgtggacgtgctgggcatcagcaccgataaacctgaaaaactctcccgtttcgctgaaaaagagctgctgaactttacccttttgtccgatgaaaaccatcaggtgtgtgaacagttcggcgtctggggcgaaaagtcgtttatgggcaaaacgtatgacggcattcaccgcatcagctttttgattgacgctgatggtaagattgaacacgtctttaatgattttaaaaccagcaatcaccatgatgtggtgctgaactggctgaaagaaaacgcgtaaaagcctcaggccgcgctgatgtgcggcctggaaagggaatgcgccgtcaggcttgccgcgccagacgcccttctccggtcatcaccagatcggcatctttaaccgcctgctcaagctgtagcgtttccacgacaatctctacgccggcgcgtaattcagcattgagcaaccctaaaagcgcggcgcccattccgcctgccgcgccgggagcgttaatcacctcacgtcccgtagcctgataaatatgccggccgcagttttccagcgcctcgtccagggtgttcaccatttccgctgtcgcccctttttgtgggccaaaaatggccgatgcgccctgaggaccacacagcggattgttgacatcgcacgcctttaagctgattggcggtagcggaatcaatttctacaatacagttttccttcagcagcgagaattttgtaggttccgacaataaaaatgccgcaacacggtgcggcattaaaaaaaagagcggctttctaagcgcttgtccctcatcaggcgtgcgcaaaatggcggcagggcactatgatgtcgttcacgctttacaacttttgtactgaccgctcaggatgaggcatccgtcacctgaccatccggccaggcatggacaacggctttaatcagcgtcgccaatggaatggcgaaaaacaccccccagaaaccccacagaccgccgaaaatcaccactgacagaataatcaccagcggatgcaaattcaccgcttcggagaaaagtaccggtaccagcaaattgccatccagcgcctgaataatgagataaacggcaaaacagctccagaattccgtccccagaccaaactgaaacagcgcgacgcccaccaccggaattgtcaccacaaaggcgccgatataggggatcagaaccgaaaagcccaccagtaccgccagcagtagcgaatagttgaggccaaacagcaaaaaacccagccaggtcgctacgcccaccaccaccatctccagcacttttccgcggatatagttggtgatctgctgattcatctcattccacacctgccccgccagcccgcgattacgcggcagcacgcggcgcacggcattcagcatctgctctttatcttttaccaggaaaaagaccatcagcggcaccagcaccagatataccgccagcgtcagtagcccgactaacgaagccagcgaatacttcaccaccgaatcgcccatgttaagcatccgggtacgcatgttttccgccatcgcatcaataatgcccgcatccatcagcgccggatagcgtcgcggcaaggtcgcggcgaaatcggacagtttattcagcataccgggcatatcacgaatcaggtaaataccctgctgccaggcaatcggcatcaccacaaacgccattaataacagaatgccgacaaaaaggataaggacaatggaggctgcccagcgccgggaacagccaatcgcctgcaggcgcgccgtcggccactccagcaggtaggccagtacgatagcgaccagcagcggcgctaacaggccgctaaagaaaaagaggatgctaaaaccagccaccagaatgaccagcaaggcaatcgcctccgggtcgctgaagcgacggcgataccattgcattaacatttcgagcataaaacccttcccagaactcaactgcgggattgtgatgccgaattgtatcgaaatgtcacaaaaaagacttcgctttttatcgttgattcaggaaactaaaatagtgagtctgtgctcatcacagttacacttatgaagtgtcggagcgtggaacgatatttcacgacgttggtcaaagggctatctcaaaacaacaggatagaggttatgttcaggcagttgaaaaaaaacctggtggcaaccctcattgcagcattggctctcggtcaggtcgcgcccgcatttgccgaccctgccgacacgctgcccgatatgggaacctcggcaggaagcacgctttctatcggacaagagatgcaaatgggcgacttttatgtgcgccagctacgcggcagcgcgccgttaatcaacgatccgctgctggtgcaatacattaacgcgctgggtatgcgtctggtctcgcacgccgactccgtcaaaacgcccttccattttttcttgatcaataatgacgaaatcaacgccttcgcgttctttggcggcaatgtggtgctgcactcggcgctttttcgctacgcggataacgaaagccagctagcttcagtcatggcgcatgaaatctcccacgtgacgcagcgccacctggcgcgcgcgatggaagatcaaaagcgcagcgcgccgcttacctgggtgggcgcgctgggttccattttgctggccatggccagcccacaggccggtatggcggcgctaaccggtactctggcgggaacgcgccagggaatgataagtttcacccagcaaaatgagcaagaagccgaccgtattggtattcaggtactgcaacgcgccggatttgacccacaggcgatgccctctttcctcgaaaaactgctcgaccaggcgcgttactccacgcgcccgcctgaaattttgctcactcaccccttaccggaaagccgccttgcggatgcccgcaaccgtgccaaccagatgcgcccggtcgtggtgcaatcttccgccgacttttatttcgccaaagcgcgcgccctgggaatgtacaattccggacgtaaccagcttaccagcgacctgctggatcagtggtctaaaggcaacgtgcgtcagcaacatgcggcgcaatatggccgggcgttgcaggcgatggaagcgagcaagtacgatgaagcgcgcaaaacgttgcagccgctgttaagcgcggaaccgaacaatgcctggtatcttgacctcgccaccgatattgacctggggcagaaaagagccaacgacgcgattaatcgcctgaaaaatgcccgcgatctgcgcgttaatcctgtgctgcagttaaacctcgccaatgcgtacctccagggaggccagccgaaagcggcggaaaccattctgaatcgctacacctttagccataaagatgacggtaacggctgggatctgcttgctcaggccgaagccgcgctgaacaaccgcgatcaggagctggcggcgcgcgctgaaagttatgcgctggcgggacgactggatcaggcaatttcactgctcagtagcgccagcgcccaggcaaaactgggtagtcagcaacaggcgcgttacgatgcgcgtatcgaccagttgcgccagttacaggaacgcttcaagccatacacgaaaatgtaatcgccgtttattagccggatggcgtcacaaggagaactcatgaccgacacgattaaaatctaccataacccgcgctgctcgaagagccgcgacacgctgaacctgctgaaatctaacggcgtggaaccggaagtggtgctttatctggatacgcccgccgatgccgccaccgtgcgggaactgctgcgtatgttgggcatgtccagcgcgcgcgaactgatgcgccagaaagaagatctctataaaacgcttcacctggcggatagtgagctgagtgaagaggcgttaatccaggcgctggttgaacaccctaaactgatggagcgccccattgtggtggcaaatggtcaggcgcgcattggccgaccgcctgagcaggtgctggacatcctcggttaaccgttgaacgccgccgtcgcggcgtattacagtttcaggatctctttgacaaacgggatcgtcagttttcgctgggcagtgatcgacgcatgatcgagctgatccagcgtcataaacagcgtgcgcatttcgcgatcaagacgtttgagtaaaaaccgcccgacatcttccggcagttcaaacccccgtaaccgggcgcgcaactgtagcgcctgaagtttgtcttcatcggaaagaggctggagtttatagatttgcccccagtccagacgggaagcgagatcgggcaagcccagatttaactgtcttggcggacgatcgccggtgatcaataaccgcgtcttaccggactccagaatgcggttatagagatcaaagatcgccatctcccacagttcatcgccagcgacacactcaatgttatcaatacacaccagcgagaggtgttccataccgtcgagcacttccggcacgaaccaggtacgtttatcgagcgggacgtagcctaccgcatctccacgctgcgacagttcagcacaggcggcgtgcagtaaatggctgcggcccgcgccttcacgcgcccaaaggtagatatatccactatgttcctggcgcaacacgttttgtaacgcggccagtagagaggcgttatcccccggccagaaacttgcgaaagtttcgtcgtcaggaagataaagtggcaaagagagctgtgccggtgtgttcagagatacctcaacccaggatgacataaaatcgcgctgagtttaccacataattcccgtgagatagaaccgggcagcatcgctgcccggcaacccgttactgatgcgggggctccgcatcatttgcctccagtaccacttcttccggacgcaacaggctaatcagtttaaaaatcaggctcaggcaaatcccgacgatggtcgccagcgccatccctttcaattctgccgcgccgatatgcactttcgcgccgctcacgccgatgatcaaaatcaccgaggtgaggatcaggttttgcgctttgttgtagtcgactttcgattcgatcaagacgcgaatccccgacgcgccgataacgccgtacaacagcagcgagacgccgcccatcacgggtaacgggataatctgaatcgccgccgccagtttgccaacgcaggaaagcagaatggcgaaaatcgccgcgccgccgataacccaggtactgtaaacgcgggtgatcgccatgacgccaatattttccccataggtggtattcggcgtggagccgaagaaaccggaaatgatcgtcgacagtccgttagcgaacatcgagcggtgcaaaccgggatcgcgcactaaatcttttttgacgatattcgccgtcaccaccagatgaccgacatgctcggcgatcacgaccaacgccgcgggcagaatcgtcaggatcgcgaaccattcaaaacgcggcgtatagaaggtcggcagcgcaaaccagtgcgcctgggcaatcggcgtggtatcgaccacccccagcgcgaatgacagcgcatagcccgccagcacgccgatcaaaatcggaatgatcgccaggaaaccgcgaaacagtacggagccgaacaccgtcaccgccagcgtgaccatggagatgataattgttttcgtgtccggcgactgcccttgcgcaggcagtaatccggccatccccgccgcgacgccagccagctccagaccgatgacggcaacgattgcgcccattgccgcaggcgggaacatcacatccagccagccggtgcccgcttttttaacgatgaaagagaccagacagaacaacacgccgcacataataaaaccgcccagcgccacttcataacccagcggcaacaacagtaataccggggaaataaaggcaaagctcgatccgaggtaggcaggaattttacctttgcagataaagagatacagcaacgttccgataccgttaaacagcagcaccgtcgcgggattgatatgaaacagaactggcaccagcacggtcgcgccaaacatggcgaaaaggtgctgtaaactaagcgggattgtctgtaaaagcggcggtctttcactcaccccgatagcacggcgcgtcatagtgttttcctctaagtgtgtttgttatgagtggttttattcaaaaaaaagccgactcttaaagtcggcttttaattatttattcacttatttggtaccaaaaatcttatcgccggcatcgccaagccccggaataatgtatccgtgctcgttaagcccctgatcgatagaggcggtgtacagttcaacgtccgggtgcgctttttccagcgccgcaatgccttccggcgcggcgaccagcaccagcaccttaatgctgctacagcctgcttttttcagcaggtcgatggtcgcgatgacagaaccgccagtcgccagcatcgggtcgacgatcagcgccatgcgctcatcaatgttcgataccagtttctggaaataaggtactggctcaagcgtctcttcgttacggtacatcccgactacgctgatacgcgcgctcggtacattttccagaacgccttccatcatacccagacccgcgcgcagaatcggcacaacggtaatttttttacctttgatctggtcgatttccaccgggccattccagccttcgatggtgactttttccgtttccaggtcggctgtcgcttcatacgtcagcaggctgcctacttctgaggcgagttcacgaaagcgtttagtgctaatgtcgttttcacgcatcagacccagcttgtgtttgacgagtgggtgtttgacttccacgatcttcatactcttctcctatcctcagatgactggcaaccacaaaaaaaatcgccggattataccgcttttcctctctgacgcaacacaatgtatgcttgacctggatcaaccaaaagcgctgatagcggaaaagtgagtataaatcactcacgttgaaacaggcgataaaggctaacaaccgtttgaatattagcaattttaagggtgaatgacctgtcccgaccgcctgtcgtaaaccaagtgctggatatccttttcttttttaccaacagggaaattttcaagcagcgaccgaaaccatgcaaaaaaaatcgcccggataaccagggcgcagaccacgctcgcaaacgtttgctttccctgttagaattgcgccgaatttaacttttaccgcaagaaaaacgtggggaaccaggcagtgaccgataagacctctcttagctataaagatgccggcgtcgatattgatgcgggtaacgctctggttgatcgaatcaaaggcgtagtgaagaaaactcgccgcccggaggttatgggcggtctgggcggtttcggtgcgctgtgcgcgttgccgcaaaaatatcgtgaaccggtactggtttccggcactgacggcgtaggtaccaaacttcgcctggcgatggacttaaagcgtcacgacgctatcggtattgatctggtggcaatgtgcgtaaacgatctggtcgttcagggcgcggaaccgctgtttttcctcgattactatgccacgggtaaactggatgtcgataccgccgccagcgtgatcaacggtattgccgaaggctgcctgcaatccggctgcgcgctggtcggcggcgagacggcggaaatgccgggcatgtatcacggcgaagattacgatgtggcgggtttctgcgtcggcgtagtcgaaaaatcagaaatcatcgacggctcccgggttgccgaaggcgacgtgctgattgcactcggctccagcggcccgcactcgaatggatattcgctggtgcggaaaattattgacgttagcggctgcgacccacaaaccactctgctggaagggaagccgctggccgatcatctgcttgaaccgacccgtatctacgtaaaatcggttctggaactgattgaaaacgtcgatgtacacgctatcgcccacctcaccggcgggggcttttgggaaaatattccgcgcgttctgccggagaatacccaggcggtaattaatgagtcgtcctggcagtggcccgccatctttacctggctgcaaaccgccggtaatgtcagccgacatgaaatgtaccgtacctttaactgcggcgtcggcatggtgattgcgctctccgctccggaagcggacaaagcgcttgctctgctaaacgagaaaggtgaaaacgcatggaaaatcggtatcatcaaagcctctgattccgaacagcgtgtggttattgaataatgaatattgtggtgctgatttccggcaatggaagcaatttacaggcgattatcgatgcctgcgaagcgaagaaaattaaaggcaccctcagggcagtattcagcaataaggccgacgcgttcggccttgaacgcgccagagaagccggtattccggcgcaagcgctgactgccgatcggtttgacagccgcgacgccttcgatcgcgagctgattcgcaagatagacgcgtatgcgcccgatgtggtcgtgctggccggttttatgcgtattctgagtccgatgtttgtcgcgcattactacgggcgtctgctgaacattcacccttccctgctaccaaaatatccggggttgcatacccatcgccaggcgctggaaaacggcgatgaggagcacggtacctcggtacatttcgtgacagacgaactcgacggcggcccggtcattctccaggcgaaggtgccggtttttgccaacgacagcgaagatgatatcaccgcacgcgtacagactcaggaacatgcgatttatccgctggtgattagctggtttgcgcaggggcgtctaaagatgcgcgataacgccgcctggctggacgggcgtcgtctgccgccgcaaggttatgcgtctgacgaataatatgtcatcggacaggactgcgtctgcttgccggatggcggcataaatgcctatccggcctactcttttcccttcctttatgctatcagtttattgtcatatttttctgacgctgttggacattaacgcgtaatgctcgccataattatcaggcagtgtcccgtgaataaaacggagtataggtagtaatgggtcaggaaaagctatatatcgagaaagaactgagctggttagcatttaacgaacgcgtgttacaggaagcagcggataaatccaacccgttgattgagcggatgcggttcctgggaatctattctaataacctcgacgagttctacaaagtgcgtttcgctgaactgaaacgacgtattattatcagcgaagaacagggttcaaattctcattcacgccatttgttaggcaaaattcagtcccgcgtgttgaaagcagaccaggagttcgacggcctgtacaacgaattactgctggaaatggcgcgtaatcaaatctttctgatcaacgagcgtcagctctcggtgaaccaacaaagctggttgcgccactattttaagcactatttgcgccagcatattaccccgattctcattaaccgggagacggatcttgttcagtttttaaaagatgattacacctatctggcggtggagattatccgtggcgacaccatcaactatgcgctgctggagataccgtccgacaaagtcccacgcttcgttaatctgccgccggagacaccgcgcagacgcaagccgatgatcctgctggataatattctgcgctactgcctggatgacatttttaaagggttcttcgactatgacgcgcttaatgcctattcgatgaaaatgacccgcgatgccgaatatgacctggtgcatgagatggaatccagtctgatggagctgatgtcttccagcctgaagcagcgcctgaccgctgagcctgtgcgctttgtctatcaacgcgatatgcccgccgcgctggtcgacgtactgcgggaaaaactgacgatctcccggtatgactcaatcgtacccggcgggcgctaccacaattttaaagactttattaattttccgaatgtcggtaaagccaacctggtcaataaaccgttaccgcggttacgccatctttggtttgataaagagaagtttcgtaacggtttcgacgcgattcgtgaacgtgatgtgctgctctattatccttatcacacctttgaacatgtgctggaactgctgcgtcaggcgtcgtttgacccaagcgtgctggcgatcaaaatcaatatttatcgcgtagcgaaagactcgcgcattattgactcgatgatccatgccgcccataacggcaaaaaagtcaccgtggtggtggagttgcaggcgcgcttcgatgaagaggcaaatattcactgggccaagcggttaaccgaagcgggcgtccatgttattttctctgcgcccgggctgaaaattcacgccaaactctttctcatctcacgaaaagagggtgatgacgtggtgcgttatgcgcatatcggcaccggtaacttcaacgaaaaaacagcgcggctgtataccgattattcgctgctgaccgccgatgcgcgcattaccaatgaagtgcgtcgggtctttaattttattgaaaacccctatcgcccggtcactttcgattatttgatggtttctccacaaaactcacggcgtctgctgtatgagatgatcgatcgtgaaatcgccaatgcccagcaaggcttaccgtcagggattaccttaaagcttaacaacctggttgataaagggttggtcgacaggctatacgccgcgtcgggttcgggcgtccaggtcaatctgctggtacgcggtatgtgttctcttattccgcaactggaaggcattagcgataatattcgtgcgattagcattgtggatcgctatctggaacacgatcgggtttatattttcgaaaacggcggtgataagcaagtttggctctcttcagctgactggatgacgcgtaatattgactaccgtatcgaagtcgctacgcctatcctcgacccgcggcttaaacaacgcgtcctggatatcattgacattctgtttagcgacacggtaaaagcgcgttttatcgataaagaactcagcaaccgctacgtaccgcgcggcaatcgccgtaaagtccaggcgcagctggcaatttatgactacatcaaatcactcgagcaaccagactaacgctatgccaatttacgataaatcccctcgtccgcaggagttcgctgcggtcgatctcggctcaaacagctttcatatggtcattgcccgcgtggttgacggcgcaatgcagattatcgggcgcttaaaacagcgcgtccatctggcggacgggctgggcgcagataacaaactcagcgaagaagccatggaacgggggcttagctgtctgtcgctgtttgctgaacgcttacaaggtttctccccttccagcgtctgtatcgtaggcacccatacgttacgtcaggcgcaaaatgccgctgattttctcaaacgcgcggaaaaggttattccctacccgatagagattatttccggtaacgaagaagcgcgcctgatttttatgggcgtagaacatacgcagccggaaaaaggccgcaagctggtgatcgatatcggcggcgggtcaacagagctggtcattggcgaaaacttcgaacccaggctggttgaaagccgtcgtatgggctgcgtgagcttcgcgcagctctactttcccggcggcgttatcaataaagaaaacttccagcgcgcccgaatggcggcggcgcaaaaactggaaaccttaacctggcagtatcgtattcagggttggaacgtagcgatgggcgcttccggtacgattaaggccgctcatgaagttctcctggcgctgggtgagaaagatggcttcattacgccggagcgcctcgataaactgaagtcagaagtgttgaagcaccgctcctttaatgcgctcagcctgccgggtctgtctgaagaacgaaaagcggtctttgtgccgggcctggcgattctgtgcggcgtttttgatgctctggctatccgcgagcttcgcctttccgacggcgcattgcgcgaaggcgtactgtatgaaatggaaggccgcttccgccatcaggatgttcgcagccgtaccgcaaaaagtctggccaatcaatacaacattgacagagaacaggccagacgcgtgctggaaaccaccatgcagatgtacgagcagtggcaggcccagcagccaaaactggcgcatccgcagcttgaagcgttgcttcgctgggcggcaatgctgcatgaggttggactgaatattaatcacagcggtttacatcgccattcggcttatattctgcaacacagcgatttgcccggctttaatcaggagcagcaaatgatgatggcgacgctggtgcgttaccatcgtaaagccataaaactggatgatatgccccgctttacgctgtttaagaaaaaacagtatctgccgttaattcagctacttcggctgggcgtattactgaacaaccagcggcaggcgaccaccacgccgccgacgctgcggctaacgaccgatgacagccactggacgttatgttttccgcatgactggttcagccagaatgcgctggtactgcttgatctggaaaaagaacagcagtactgggaagcggtaactggctggcgtctcaatattgaggaagaaagctcgccggagatcgccgcgtaaattgtgagccagacgccgcgccgcggcgtctgtctttactgaatctcagataatagctgcggctcgccaattaaatatccctgaagatagtcgatccccaacgagagcactacgcttcgtatttcttcgctctcgacatactccgcgacgacctgcatatttttcattcgcgctaaatgacaaatagaagccacaatctgataatcgagactgtttgacactatattgcgaataaaactgccatcaattttaagaatatcggcgtcaacgtttttcagccgcgcatagctggcgtagccagtaccgaaatcatcaatcgctatctgacagccaaactgctgtagctgtcccagcgtcaactgcgcctgctcagcattggtgagagagttgctttccgttacctcaaaaaccagttgccagggttcaacctgatattgcgtaagcagctgcttaacttctgcagggaaacgagcgcggcataccgatgttggcgacagattaatggcaaaacgatgcgcgggcatatattcccggctggccgccataaaccgcagcgtgttttcaatcacccaaagatcgatagcggaagacaatccaaactcatgcgccacgggtaaaaaattgtccgggttgataacgtcgccgttgtcatccctgagtcgcagtaagatttcatggtaaacgtccccacgaacaccgaaaataggctgcgccatcaggaaaaaatgatcgtgctccaacgcctgttgcaggcgattcatcatcgcaattctgcccttcaaatcgcgctgcaggtgcattgcgccgcgccgctgtaaatcctccggcgcgttagtcgtcaacgaaagatcggaactggtgcttaattcgcccaacagcagataaaggtggctaaccggagaacgcacgcagcaatagctcacgccgacaggcggctgtagcggcagtccatcccagataaaccgaaactgcttaatatgtttatccagcgcttcaatacgctgctgatgcgcctctgtattaagacgcagcaccaggtcgtgccctgacatctggtagacgcactcatttgaggccagcatcggcgtaatccagtgagagagcttttgcttatactggatgcgtagcatgacgccataatttttacccaatagctccaggcccggcacgtgtaaaaaacagatcgtagaccagggcgcattttggagcgcgcggtttaacgcacgtaaattgggaagatgtacaaccgggtcaagataggccagccgccgtgcgcgaccactcactacgcgctgacgcgtggccagtacagacatataattaacaataaaagaaaaaaccagatagctcgaagaggtaatcgctaattgcgtatcataacctgaataccagggcatataacgctgataataatgaatcgacgtaattagcacgacggcccagataattgaaataaacttatagccatagcgcatcgcgccccacagcatgaccggcaataataacgaaagcgtatagttggtactaaatattgaactattatcagtcaatggcatacacagtataaacattagtgtagtcaatacggccagccaaataacgatctcttttttagtggccttgctatcaatctgtagctttaattgctgataatacccccgtaggtgcagcggattgcgaagagtacgaataataaaatagcacaatggcacgccgacaaggttaccgaccagtaacgcctggtaattaatcagcgtgttgatattaaagggcattacccccatcaggctggctttgctttcgtacatgccaacaaaagcggcaaactggtagatgaccagaaataatgttgctgaacaaaatacctgccagaatattcgttgaaacagcaggtgggcgtcgccgtgggaaacattgtttcgccggggggaaaagacacgatagccgccccagcttagcacgatagtaatgataaagtgcatcgtcacggaaagggtttcatacagccctgtctgcgggtatctgcgccagaagatagcaagcacaatgcccggcagtgctgcccagccgaaaaagagcatcaggctaagcataaaagctaacggcaggtaaaaaagaaccacatttccagtgctggtaagcgcataagtatttgcgctacttaaaacaggcagtaaaatcgaagggagaatgagcggtagtccccaccatttatctctgatatttatataagttttatttagtttcatagatgctcagcagaaccccccaatcccaaaggggcgttaacagacaggcatcccacctgactttaaattgatgatgagatatacatcacacgatagtcatcgattgtaattattaaacaaaagtaacatttgatttaagtcaattattacctttctcctgcagcctttattcgcctttttattctttgttatcattaatttattattaatgtaaatactaaaattatcttccataacaatataagataaatcaactgacgcaattttacattaagaggaattgaccatcggttcgcagtatgccttaatgtagagtgaacgcaggcttgttacgttcttcgccttgataatacccttgaagaacccagcctgatcccgcccatatcgctgggccaacgttaaggaaccctttgtgagtcaggccaacagtatgcgaaaacgacatcgatttaacactcgcatgacccgtatcgtactgcttatcagttttctcttcttctttggacgtttcgtctactcttctatcggcgcctggcagcaccatcaggataaaaaagaagcgcaacagtcatcgctttctgtcaccacgccgggacaacgttaagctgttatccgttaaaaagcccgcgcaagaaaaagaagctttagcgttaacgcaaaaagacaatcccactcaatgggttcaggccatgatcagacgcttaaagagcaaccgcgggatatcctgcctgggtgataagatcacatgcgcggttactaagattccctcgaccgaatacaaaacccgatagccttcagcgtggttaaactcccggtagctggcacagccaattttcagcagttcagggcaaccagttctacctacgaggggtaaacctcgtgggacaactccagtaacattaattgcttctaagtacatcagtaattggttgaactataaactgccacctgggatcagattaccaacgttgacaggcaaaactatcaactcattacagctaagctcaacgaataatttaggtcgtttcgttggtcgtaatgtaccctggctcggttgggttatgacattcactacgatttatgatatccagcgtaatattaaagatacatttaatcgtgtggcggttcctaaagatcgcattaagtggacgtacttctaatgagagatattgagaaagaaattatcgattttatcgatcaggaatataacactaaaaagtactttctctgtgggccaaagcgaatcatcacgcttgataccagtattagggatgatcttaaactcgtttttgaagatagtgaagaacttctacaaaagtacttcaagcgttggaatgtagattcagaaggatttgacatactcaactatctgaatccagagcactttggaagtaaagagcctgatccgcgtaagccactaacggttggtatgctcgttgaaagtgctaaagctgggcgttggttatatagttgaagaataaagttactatattttaaataccccttatttgggctgaatcgccacggataacctggacacttctgagtcgttggtagatctttttctttatccgttcacgcttcagtagctggaaaaagctttctgcaaccgcattgtcatgacagttgccacaacggctcatactgccctccagtccgtgcaatttcagccattcatagcgggtgtactgactaccctgatcagactgaaccagcacctgtttttggggatgacgtcgccacacggccatcagaagcgcattcagaacaatatcttttgtcattcgtggttgcattgaccaaccgataactttgcacgagaacaaatcaacgaccacggcaagatacaaccaaccttcgtgggttcgtaattacgtcaaatttgccgtcaggaactgtgcgccacatagaaaattcatgaatgcacataaataaaaaccctctgtaaaaacagagggttaaattcacctttacctgttcatgaaaacacaggaaggattatcggcttattcccactcaatggtagccggcggtttaccgctgatgtcatacaccacacgggaaatcccgttgacttcattgatgatgcggttggaaacgcgaccgaggaagtcatacggcaggtgcgcccagtgtgcggtcataaagtcgatggtttcgacggcacgcagagagacaacccagtcatacttacgaccatcgcccataacgccaacggaacgaaccggcaggaagacggtaaacgcctgactgactttgtcgtacagatccgctttgcgcagctcttcaatgaagatagcgtcagcacggcgcagcaggtcgcagtactctttcttcacttcacccagaacacgaacgccgaggcccggccccgggaacggatggcgatacagcatgtcatacggcaggcccagctccagaccaatcttacgcacttcgtctttgaacagctctttcagcggttcaaccagccccatcttcatctctttcggcaagccgccgacattgtggtgagatttgatgacgtgcgctttaccggttgcagacgccgcagattcgataacgtcagggtaaatggtgccttgcgccagccacttcacgtcttccagtttgagcgcttcttcgtcgaacacttctacaaaaacacgaccgatgatcttacgcttggcttccggatcgttctcgccagccagcgcggacaggaagcgctcttctgccggtacgtgaacgatattcaggccaaaatggtcgccaaacatgtccatcacctgctcggcttcgttgagacgcagcaggccgttgtcgacgaatacacaggtcagatttttaccgatcgcgcggtgcagcagcattgcggtgacggaagaatccacgccaccagagaggccgaggatcactttgtcgtcgcccacctgctcgcgaatgcgcgccacggcgtcgtcgatgatcttcgccggcgtccacaacgcttcacactggcagatatcgcgtacaaaacgctccagcatgcgcataccctggcgggtgtgagtcacttccgggtggaactgtacaccgtagaagcgtttttcttcgttggccataatggcgaacgggcagctctcggtgctggcgacggtcacgaagtcggacggaatcgccgtcactttatcgccgtggctcatccacacgtccagcagcggtttgccgtctgcggtcagggaatcttcaataccgcgaaccagcgcgctgtcggtcaacacttcgacctgcgcataaccaaattcacgctcattagaaccttctacatgaccgccaagctgcatcgccatggtctgcataccatagcaaacgccaaataccggcacgcctgcttcaaagacatactgcggcgcgcgcgggctgttttcttcggtggtgctttccgggccgccggaaagaataatgccgcttgggttgaagtcacgaatttgtgcttctgtcacatcccacgcccacagttcacagtaaacacccagctcacgcacgcggcgcgcaaccagttgagtgtactgagaaccgaagtccagaatgaggatgcgatgcttatgaatgttttccgtcattgacgcttattccgaggcaagtgaaacagattaaataaatcgcccgacacgaaggtcgggcgaagaaaatcaggagcccagacggtagttcggggactctttggtgatggtcacgtcgtgaacgtggctttcctgaatgcccgcaccgctgatacgcacaaactccgctttagtacgcagttcgtcgatggtagcacaaccggtcagccccatacaggagcgcaggcctcccatctgctggtgaatgatctctttcaggcgacctttataggctacgcgaccttcgataccttccggcaccagtttgtcagcggcgttgtcgctctggaagtaacggtcggaggaacctttggacatcgcacccagcgagcccatgccgcggtaagatttgtaagaacggccctggtagagttcgatttcgcccggggattcttccgtacccgccagcatggaacccaccattaccgcgcttgcacctgcggcaatcgctttggctatgtcgccggagaaacggataccgccgtcagcgataaccggaataccggtaccttccagcgcttcaactgcgtcagaaacagcggtgatctgcggaacgcccacgccagtcacgatacgagtggtacagatggaacccgggccaataccgactttcaccgcgctgcaaccggcttccgccagtgcgcgagcgcctgcgcctgtcgcgacgttgccgccgatgatttgcaggtcaggatatttagcacgggtttcacggatacgttgcaacacgccttctgaatgaccgtgagaggagtcgatcagcagtacgtcaacgcctgccgccaccagcgcgtcaacgcgctcttcgttgcccgcgcctgcgccgaccgccgcgccgacacgtaaacggccctgctcatctttgcaggagtttggtttacgttccgctttctggaaatcttttacggtaatcatgccaagcagatggaagttatcatcaacgaccagcgctttttctacgcgtttttcgtgcatttttgccagcacgacttcacgggcttcgccttcacgaacggtcaccagacgctctttcggcgtcatgtaaacgctaaccggctggttcaggtcagtcacaaaacgcacgtcacgaccggtgatgatacccaccagctcgttatcttcagtcaccaccggatagcccgcaaaaccgttacgctcggtcagggctttcacttcatgcaacgtggtggttggcaggacggtctgcgggtcggtcactacgccggactcgtgtttcttcacgcggcgaacttcttccgcctggcgctcaatggacatgtttttgtggataaaaccaatgccgccttcctgggccagggcaattgccaggcgcgcttccgtcacggtgtccatcgccgcagaaagcataggaatattcagacgaatagttttcgtcaactgcgtgctgagatcggcagtattcggcaaaacggtggagtgagcgggaacaaggaggacgtcgtcaaacgtcagggcttctttagcgatacgtagcatgggcaatatctcacctgggaggttaataaatattgccgcggcattatacagaacgtaatcggttgcatctacatttttttgcaaatagtgcttgcgatcccccgtgagcaggttactatcgattgaataacctgctgatttagaatttgatcccgctcacatgttatcctctcaaacttcctcaatttttaccgtaagccgccttaaccagacggttcgtctgctgttagaacaggagatgggacaggtatggatcagcggcgagatttctaatttcacgcagcctgcgtcgggccactggtactttacgctcaaagacgataccgctcaggtgcgctgtgcgatgttccgtaacagcaatcgccgggtgacgttccgcccgcagcacgggcagcaggtgctggtacgcgccaacattacgctgtacgagccgcgcggcgattatcaaatcatcgccgaaagtatgcagcccgcgggcgaaggcttgttgcagcagaaatatgagcagctaaaagccaaactgcaggccgaaggcttgttcgatcagcagcataaacagccgttgccctccccggcccactgcgttggggtgatcacttcgaaaaccggcgcggcgctgcacgatattctccacgtgctaaagcgtcgtgacccatccctgcccgttattatctatccaaccgcagtccagggcgacgacgcgccggggcagatcgttcgtgctatcgaactggcgaacgcgcgcggcgaatgtgatgtactgatcgtcgggcgcggcggcggttcgctggaagatttgtggagttttaacgacgaacgcgtggcgcgggcgatttttgccagccgcattccggtggtcagcgccgtcggtcacgaaacggacgtcacgatagctgattttgtcgccgacctgcgcgcgcctacgccatcagcagcggcagaaattgtcagccgtaaccagcaggagttgttgcgtcagatccagtccgcccagcagcgtctgggcatggcgatggactactacctcgccaatcgcagccgccgtttcacgcagatttttcaccgtctgcaacagcaacatccgcaactgcgtctggcccgtcagcaaaccgcgctggaacgtctacgccaacggatgggatttgcgcttgaggccaggattaagcaggccaatcaacgccaacagtgcgtaagtcaacgcctgagccagcaaaatccgcagccgcgcattcaccgcgcgcagtcgcgcatccaacagcttgaatatcgtctgacggagaatatccgctcacggttaagcgaacagcgcgagcgttttggcaacgcggtcacgcatctggaagcggtcagcccgttagccacgctggcgcgcggctatacggtttcgacgacaacggacggcaaggtgctgaaaaagatcaaacaggtcaaagcaggcgatatcatgaccacgagactggaggacggctggcttgaaagtgaagtcaaatccgtcacgccgggcacgtaatccaacactcccccaccctttgcagcgcgatgttgggtttcgacttcgcctcagccaacctacgcgccacgtcggataaggtgtagccataatctgacgatcaaccggtttgtcattcgcctcaaaaccgggcagggaacacccgcccggttttgtctaacttaccagttatagcgcagattgaggctaccgttcagatcgccaaagtcattgctgccagtctgcccggcaacctgagcgcgaacgctccactgcttatcgatatctgcctgcagacccactttcagctccgcacggttagccggaagatcctgtttcaccgtagcatcatcaaacgataccgacacatcatcgctggtgtgcagccagttagcttcagcaaacggctggataaccgtacggctgcctttgtacagcttgccgtcaacacgcagacccagacgcgttgtccaactgtcgccatcctgaccatcgatccgggtgccgtagttatccttcacgctatccgctgagtaattctgccagacaacctgcgcctgcggcgtcagactgacagtattaccgttgctaagcgcaatatcgtagcgataaccagtttccagcgagacggcgttagcggttgaatcataagattcagatcccgcatcaccgctctctacgctgttgttgtagaaaccatattggtaccagctgtcgacatacgcgccgctatgcgtttgggcatcggcaaaccaggtggcatagacgccaaggttgtagccgtctacgttgccgctactggtgaactggctaccgtctgcgccacggttaccggtgctgtcggtatcggcgttgatgtagctcgccatgacgccaacggtaacgctctgctggccgttaccccaggccagaatgtcgccgcctaactggaactgggagtagttgctgtccatatcgatattgccgctgacagcctcggattccgctttacccgctttgaagcgcgcccatacgctgccatcggcattacgatactggctgccctcgcggtcatagagggtctgcatttgcaggttgcgcgccatccactggttgcccatgtacgcgccgatatccgcacggtactgcggtgcgacatcgccgccgtggtccggaggcgtgacatcgccgccgtcgccgccgtcgtccggaggcgtgacattaccgccatcgccgccgtcgtccggaggcgtgacattaccgccatcgtcaccgccatccgaaggcgtgtcatcaccgccgctgtcgtcatcatcagactgtgcttttgacgccagataccagtcgttgtcactttcattccagtacagacggtaggtatacagaccggcgttaacctcattttttagctcaaacgcatcgctggtcgatacgccgccaacatccaccacttcgataccgttagtggtctgtgctccatcgccgatgccgttgatgtacagatcggtggtgccggaagcatcgccggtaatgaccaacttatcggttgccgaatcatcgtcgcccaggacggtattcaggtaaagcgagccgccgttgccggtgtaattgccatcgacataaagcgtattgccaggcgtgctggagctgctaccactggtcattgtccccatgttgatcagatcgccattgagggtgaagatagcgcctgtttcctcgctgttgccgaagaccagcgtcccttcgttggtcaccttaccgttaacggtcgtaccattgctgccgccgaaggtcgccccggaggcgacgttcaccgcctgctggctgcccatctcgccaatcgagccgtctccggacagccatagcgtgccttcctgtacgttggtatcgccgctataggtgttcgcgccgctcagcgtcaatttacccgcgcccagtttggtcagcgatttaccgtcccagtcgccgttgccggttttatcgcccagtacgctggtgacttcaaaactgtcgcctgcgcccagggtaaacgtgccgtgtgctggcgtcgctgacgtggcggtcgcattccagctcagcccttcggtaagcagatattctgacgcatcttcaggattgattgtcccggttacggtcagatagtccggcttgtcagtgaggttcatcgtcaggctggtaaagtcgccgctgatatcgctggtcatatccatcagtttaaaggactggaactccgcgtcggaggcgcgcgcttgcaggctggcgtcgctgacgaccaaatcgccgccaagcgtggcgctgctgccggtaatcagcggttgcactgagtcactattcagctcaacgttcagcgtactgccatcttgctgaattaacgcgctgtcgccgagatccaacgaggtgccgagcgccagttgggtcgtcgcgccgctatgagtggtgatgccgcccaccgcgctgacttcaccgtctgcgtccagcaccagcgtggcattattgtctaccagaccggtgcccagcgccgtcgtactggcggcgaccagcgtaccttcattgatggtggtgccgccgctgtagtcgttgtcgccagagaggatcagcgtgcctgcgccttctttggtcagcgatttaccgtcccatctgctacccggatccagcgtatcgtcaacgtctgtcagtgtagccgcaacgttaaagctgccgtcagggtcgctcagggtaaaggtgccgtgggcgtcggtagtggcgttgtctctgtccgcataccaggagagggaggccgtcagatcatagtgggtgttgtctgcttcatcgacttttccgtcgatagtcaggaagtcaacatcttctctattcattcccgcgacggtcagatcgtcgaaatcggtcgtaatggcgctgtcgctgccaatcagcgtgtaggtgtatgcctcaggcgtccagctgtctgtaacgctgccaatgccggtaacattcagcgtgccgcccagcgcgacgctgtcggcggtaatcacggcgtcgtcggtggccgcgccgaggtcaatacttagcgtactgccgtcttcctgggtgaactggcccgcgtcaagggtgctgcccgctgccagcgcggtagtggcgccgctatgggtggtgacgttcgcaagctcaaatgcgccgttggcatccagtatcagcgtaccgctgttgtcgatattgccgctgcccagcgcgttgacgttggcggcaatcagcgtgccgtcagtgatagtggtggcgccggaatagctgttgtcgccgcctaacgtcagctcgccggtaccggttttgaccagcgaaccgctgccggaaagcgtattttccagctcgccctcaccgacctgaagcacaccgctgttggcaacagctccggtacccagcgaatccgcatggtcagccgtcagcgtaccgccgataatggtggtgccgccggagtaactgttatcgccgcttaacgtcagttcgcccgtaccggttttgaccagcgaaccgctgccggaaagcgtattttccagctcgccctcgccgacctgaagcacaccgctgttggcaacagctccggtacccagcgaatccgcatggtcagccgtcagcgtaccgccgataatggtggtgccgccggagtaactgttatcgccgcttaacgtcagttcgcccgtaccggttttgaccagcgaaccgctgccggaaagcgtattttccagctcgccctcgccgacctgaagcacgccgctgttggcaacagctccggtacccagcgaatccgcatggtcagccgtcagcgtaccgccgataatggtggtgccgccggagtaatcgttgccgccgcttaacgtcagctcgccggtaccggttttcaccagcgaaccgctgccggaaagcgtattttccagatcgccttcgcccaccttaagcacgccgctgttatcgatatcgccgctgcccagcgaatccgcatggtcagccgtcagcgtaccgccggtaatggtggtgccgccggagtaagtgttgtcgccgcttagcgtcagctcgcctgtgccggttttcaccagcgagccgctgccggaaaggatgttttccagctcgccttcgcccaccttaagcacgccgctgttgtcgatatcgccgctgcccagcgaatccgcatggtcagccgtcagcgtaccgccggaaatagtggtgccgccgctgtagttgttatcgccggtcacgatcagctcatcgctaccgcttttgacaatttggccctcgccggtcacgttgttatccagcgtgccctggctcagcgcaagcgttgcgctttctgcaatcgtcacatcgccagtgccgagcgcggcggcgtctttggcggccagaatgccgccgtcaatttcagtatcgccgtagtcgttgccggtgttgctgaggatcagcgtgccgtcgccttgtttggttagcttgctgccgttccagttggaggtcgccgtggtttcgtccagttcgctggtgacggtaaaggtactgcctgcatcaacggtaaaagtgccatgcgcagcgcgcgcagaatttgcgcccgcgtaccaactcaagcccgtagacaactcgtagttggtattatcattcgcatcaacgcccgcgttgatcgtcagataatccggcatagcggaggtgtcagcatccagtgttacgctgtcaaaatcggtagtgattgcagtttgcgaatcaatcagcgtgatcgatccaaagtgttcgtcggtttcgggcgcgacaaaggtggccgttgagctaaggttcagcgtcccgtccagcgtgacgttggcggctttgataattggcgcgctgttggcggtatccagcgtcgcgtttatctggctgccgtcctgcaaggtcagggtattgtccaccgtcagcagcgtacctgtcgaaccgctcgcgttgcccagcgtaatatcgccgtcgttggtcagattgccgacggttgacgggtcggtcatgttccactggctggtgtcgtcgagcgacagcgtagtaaacatcgcatctacactaccggttaacgtggacccctggcttaaagagagcgatgacgatgacgcgtcagtctggacaatgttgccggtcagcatcgttttttcggcctgaatagtcgctttgctgcctaatttgatcgcggtcggcgccgtaaaggtgctgttggtgagctcaatggggtcgttaatggtcgtgctgccatcaatgttcagtgcgacagtttttgaggtgacgtttgcgtcgctgaccgtcagcgcgttgagatcctcatacccgtcgagttttcttttgctggttataaagataccgtcgccgtcggcgttgatggtggcgccgtcgatcctggcgtccgacgccagaatatacacgcccgtaccggcagaggtaatgttgccgcctgtaatatccagggtagtggcgttattggcctgtaccgccgcgccgctggcattggtatgtgttatggtcgcgttggtgagattaagagcggccttattggtaccctggatggtgctcatcgtacctgcagagctgaccgagctatcagacaggttcagggtggaaccctcgtctgtcgcggtgtttccggcaacaacgtttatctggccttgcgccagggtgattgtgctaccgtccagcacgttcagcgtactgccttgttgcacctgcgcgctgctgctgttagctgcctcaacgatggtaccgtccagcgttgcttctgaacccgtatacaacgtcattacgccgaaattgccgtcaatcgttagcgtactgtctgttaacctcagtgtgctgccatccgctgcggaaataccctgggtataaatacccgtagtggttatcttcgcgtcggtaagctcaaggatagcgtaatgatccagcgaaatggcgttggaaacatacttaccgccatccggatcatcagccccgcctccgcttgtttcaatgacgagccccgtccctgtgaccgtggtgggctgccagccgacggtggcgacacccgagacatatagcgccgcgccttcatcggtgcccgaatagcttatcggcggcgttgacgcatccagaacgtggggctgcgcatcagcatatgatacctgattatcggccatagccagcgggctgaaaaatccgagcgccgcagccacggcgcaagccagcgccgcgcgcgttgcttttattatttgtccatattcggacttttggtttggagaatgggtttcactcgcgcatacttgcgctttaactttgctgtggcctcgcgccagttctgaagccacgacatacatatttcgcacggcgctccagacaatactgtaagtcctgttcaatttttaaatttccctttaataacgttcacgaagcaaactggattttgattgggctgcaaatagcctttaaatgctacattatcaatgagttaaataataaataacaaaaatacagctctatgaatggttgcaatcacctgaaacaatatattatccaagccaaattattaactaatttcaaggcttatttcaatgccaggtcaatttctggttgatttataattgatataaatacattcatccatttaataaatatttatatcgtgaataacatttaataacttcatatattgaaataaataaatgcgtgaaacaaaaaggtgtgattatcatgcgacacctggcgttattttaaatatactcgtcatacttcaagttgcatgtgctgcggctgcgttccctcaccccagtcacttactttagtaagctcccggggattcgctcgcttgccgccttcctgcaactcgaattatttagagtatatacgtagcgccagatgccgggttgcagaagggagacggcgcttttacacacgcgtggcaaacggtggtgacgccaattagcagaacatatacttttcaatgaatgctactttcactttttcatgaagctcaattgaacgtgaaaagcagattattttcgtgccagacgcataatacgttactccacgcacgtcgcataacccgctgagcctgccggcttaatggcgcagttttgactcttggtattctcatctacgccgcaatacatgccgccgcttgaggttgatttagataaatagggatagccctgcgtcggccagcctaacgagctaattgaatgatacagcgtcaacaggtcgttattatccggtgctttgctaaggctaccgcactgtttggcaatatcccatttcgtgttgtccaccgtatgcgccatcgcccagtactcgttatttgcatgcactccgttggtaaatactggcgttacgcctgacagcatctcagcctgaagccacggacgatgcagcgtttttccgttgacggatgtcgtatccgacatatttccccagaacaacgctttatccgtatccgggctggtaagtaccataaaaatcacatccagcgatgcgtgaagagtcgtattgtccgtcactttcaccgtgagtggcgttttcaaccccaggcttttatcctgattaagcgtaaacgttgccgtaccgtcgctgccggtagtgccggtaaagacaatcccggtggtggtcatactttggctggcgcttgcgggagtcagctctttaagcatgagatcgtctgctccggcatccgctgccacgtcgccatccgttatcaccatacctgcccgatttttcgaatcgccacgtgacaacgtaaaaccgacgttggcgaccgggttaccgctgctatcttttaccgtcaccgttaacggcatcgcgcttcccttcgccactaccgccgcatttttcgcgctgtccatcgccgtcgaggtcagcgtaatactggcaggagtagaagtacgcggctcgaccagacacacctgagcgccggtggcagtcgatgaactggcggtgcccttaccgccgctattcaggtttataaattggtaatatccggtattcggcgcacgatccgccgcccaccaggatttgttccccgccaccggccagccgtaatttgtaccgattgcgccgttaggattgtcgctatacaacgtttgcagatcgcccgacaacggctggtattccgcatcacagccggttgcgcccgctttttcagtgttcgctgcggtgactaagggccatgtttcattgttaaccaggtaagtaccgctattcgacgtcatctccgccgccagcagcggacgccggaacttcacgcccgcgctgttggttacggtttccggcatgtgtccccagtatttagctttatcactgtccgggctggtaatgacggtgaaaatgacgtccatatcgctaactgtcagcggatcgtcgacaagcatcgcctgtagcggtgttctcaggccacgggaatcatcctgcgtcacttcgagttgcgctttaccatcctcatccgtaatgccataccaataacttgtgcacgaagataccgtgcagttaaacgtcattgagcccgtagacggcgcaaccgatgtgagtacctgcctccgccggaactgccatcaacgacacccgcccggtctatcgaaagcgttcgtcccaaacggatagcggtattgggctgcggcgtgccggaaccatccctcacagtgacggtcaacggcaggctctcgcccttcttcgccactggagcgcctttatccgcatccatgtcgctggaggtgagttctatcgacaagtcccggcgctttgccagacaaagctgcgccgtggcggtattggctttggttgtcagcgtattattatcgctgagtctgacatactgaaactgactgtctgagtgcgtggcatccggtactgagttacccgccccccaatattttcctgatgccaccggtaggccaagcgttgtcgtgagtgcgccattgggataatcggtatatagcgtctgtaaatcatttaccgtcggcaaccccagccgatcgcacgggctggcggtgtcctgatacatattcggataacggctccaggtataccaggtctcgttattttccgtataacccgacgtgtccgccgttgaagaaagttcagcgcgcagcagcggtcgcttaaattcaacccccttactgttggtaaaggtttccggcatatggccccagtatttggccttatcgctgtccgggctggtcactacggtaaagattgcgtctttgctgtctgtcaggttgctgccgtccatcgtggcggcgctgatagtggtttttaaaccggcggtactgtcctgcgcaagggtaaatgtcacctgtccctgggcatcagtttgcgcatacagatatttcgccgaggtatccagcaggtatgtcgccaggccggacggcatcacattacgcagcgtaatatcgtctgtgatgcttgaggacgatgtggcgctgttggcgcgattgtacgaagatccgcggctgattttcaccatcacgtttttcatcggctgacctgcggcgtctttcacgtcgatggtggcggccatctgctcgcccttcttcgcctttgcgcttccggtggtttcatcctggcctgccagcgtcagcgtcaggctggcggcggcgctgcgcggcgaggcaagacaggtctgcatgtagtacatcgaggtgctggtcgtcgttttgacatcattgccgtcgttaaacaggttgaccgccgcatagagcgacttcgtgccgtctgacgatatcacgtaatcccccgcccaccagtagcggctgacgttgttgttgcctgaactggtcatcggccagccgttacggctgcgcatggcgttatccgggtatgtcccgtacagtgtctggaggttggctacggtcggtagcgtgtcgcgcccacagccgccaccggtgccgttccaggctttatcgacggttatcatgccccaggtttcgcctttgtcgtagtagccgttggcgatggtcagcgttttgccgggcgtagcgctaaactcgctggccagcagcggacgcctgtacgccacgccgctgctgtcggtcagcgtttccgccatatggccccagtagttggccttcggcgtgtccggactggtgaccacgctaaagatgaccggcagcggcgcgctcgttacgccgttgtgttctatcgccgccgtcagcggcgttttaaagcccgcgccgctgtcctggctgatattcagcgtcagtgtgccgtcggcgcccgtggcggtgtaatagttagcgccgctgctacgcccgtcgctgtggtttatctgtatatccgccgccgccgagctattcacctcctgattcgcgcgcccgacgctgtcgccgcgcgtaaagataaccggcgtgtcggcggccgggttgccctgggcatcccgcgtggtgatgatgaccgggatggtctcgccgactttcgctttggcgaatccgtcgctgtcgttatacacaggcgaagtgagcgttatctgcgtcgccgccggatgggcgttttgcaggcagacaaaatagagttgttcattccacaatagcgaaccgacgccgccgtcgcgcagattaatcgacttaacgtagcggttttgcgtactccggctcaaatcggcggtgctgtcctggtagtttttaccgtccagcggccagccctgctgcgtattcatggcgccgccgggcctggcgtcgtacagcgattgcatatcggcaagggtcggcacgtatcccgcgccgcaggcgtcgttcgccatttcaaaatcgacgattccccacgcttcgttgttttccgtattgtcgccgtgggtaacgccgctggcgatttcagccgataacagcgggcgcttaaacacctcgccgttggccgccgtcgtcgtttccggcatatggccccacattttggctttgtcgctgtccgggctggtgaccacggtgaaaatagtgtcgatgctggccgtcgcgctggcgttgtcgtacagcgccgccgtaatcgcgactttcgtcccgtgggtgtccgggcgggtgacgttgatgattttgctgccgttttcaccggtcatgccgccgattttggtggcggtgtcgttgagcgaatcgccgtcgatcaccaccgccgagacgatgccgtcgccgctaccggcgatatgtttctccccctggcgggtatagccgtcgccgcggcttaacacgaacggcgcttgcggcagcggattgccgctggcgtcttttaccgtcactttaagctggagcgtatcgccctttttcaccttcaccgcgtgttcgctgtttgcgttataccacaatgccgcatccaccggctcaatggtgatagacgccgccgtcggatttttgctgaccagacagctcacgtagtccgacgcatcgccggaagcggtatagccgcccgcagccagtgataccgcctgccatgtagcggcgctggcgaaggtggatgaccagtagtcatactcagtcggccagccggatacggtgtggattttattgccgtcgctggaggcatacagtgcggcaagctgatcggcgcgcggcagatggccggcctcgcagcccccggcgttggggttattcagcgcgtcggcgtggctgacacgcgcccaggtttcgttatcctgctcctgggtacgggtggcggcagtcgcttccgccgccagctttggccgctggaatttcatatcacccacggtgagcgtgtccgccatatgaccccacatctgcgcctccggcgtatcggggctggtggcaacggtaaatttcacgctgcggttgacgggcgtggtaatcagtgagttgaccggcagtacgctcagcggcgtcagcaagcccacgccctgcggctgttcaatcaccagcgtggcgttgccctcggcatcggtcatgccctggtacgtcatcgacgcctgggaagagccgaaaggcgttccgcccatcaccagcgttccgtcgctgggatcggtaaagcccgtggtggcgttgtcgcgatttttgccgtgcgacatggtgacggtaaagctggcgttaggcacgcttaacccattcagcgcattgacggaatggacgttcatcgtgatttgttcgccgactttggctaccgcattgcgtaacgactcatcgccattaaagtaaacgtccagactggtcaccaactcattgccggagcaggagagatagttcggttcggtgccgctgaacgtgctgtccgcaccggtcgccaggttgacgtgcgcggtggtggaaccatcagtatccgccgcgatatagctgtgtttctgcgtcggccagccgtaggtcgtttccatcgcgttgccggaatgggcctgatacagcgtatccagcaacagttgccccggcacctggccggtaccgcactggttcgtcgccgccgttaccgagttaaacgtcgcccagtattcgttattctcaaattcggaaccggtatcctgcgcggcttcgtccgccagcagcgggcgtttgtagatattgcccgcttccaccacgccctgcatatggccccacatgcgcgcctgcgccacgtccgggctggtgacgacggtaaaaatcacgttctgcgtcgcttccgtgccgtcgaacagcaccacgcgcaccggggttaatacgcccgcccccttgtcctgagtcaacaccagcgagaactgaccgttggcgtcggtgacgccgtgatagtgaccgtcgctgccttccagattggtgataattaccggatcatccgtccactgatgcccgctatcaatatcggcgttcttttgattctggcgattttgctcgtcgcccaggtagacgttaaagtagcgataaggcagcggtttattggtggcgctgtcggtgacggtgatcttcatgttgatctcttcgcccaccttcactttcgccgcgttgaccgttgaatcaaaattatcggcgctaatcactaatttcggcgtgaccgcaggcggggctttatccacgcagctaaccagcgattgcgtggcgtccggcatctgcgtaagggcgcggctgcgcatatcaatgctgatatggtcagtggcagtcgatccctgggaggaggaccagtactcttcgtcaccggatgtcagccctaccggccagccgagggtggtggccagatcgccgcgcgcaatttttaacccttccagttggcgtgcatccggcagaatatcgcagtgcgcgtcggcgtggccccagttgaactgcgcccaggtttcattgttgatgctggcggtgcggtcttcactgtcggtttccgccgccagtttggggcggtaaaaggtgtagcttgcgccgtccaccgtggcggtggacgtctctgccatatgaccgtacatgttggcgctgctgctgtccgggctggtgagggtggtaaaaatcacgtccacgctggctttcagcgctggcgcgctcgacgggtgcgctatcagcggcgttttaacgcccgggccgttcgcctgggtgacgaccacggtcgccacgccctcggcgttggtcgtaccgtgatattccgtggcggtggtggtcagttcggtgttgccgacgcgcaccggcgcggcattgtttaccacgccctggcggttttgcgcgtcgccgcgggtaatcacgaaatcaacgttgccctccggttcgccgccgcagtctttggtcgttaccgtcagcatgatgctttcgcccgctttgaccttcgcggcgttgagcgactcatccagatgatcggcggcgagcgttaccgggtcgcccacggcgggcgcgatatccacggcaaacttttgatcaagcacttcgaccgccgtgttataaggcacgccggtgcgggtaagcaaccacagcggcggtatggcggttgaggtatccagttgcgaccagaccaccagatggcggcccgccagattctgcgcgcagaaacttatattgctgacgggttgtggatcaagcggcgtgtccggcgtggcggcgtcggcccacaccagcgtaacggcgggcgcgcgttcagcctgccaggccagcggcggcacggcgaagatatcgccttcggtgtcgtgcggattggttaaggtcagcgcgctgccgacatcactggtgctgaactggctgggcttcgcggagtagtcaacaggattcgccgcatcagagcgcaactgcacgctgccctgatataccgggatcgttacactatcggcctgaggcggagtgccattaatagccgcagtttgctcagtgagttcctgccatgcgccgctgcttcgcacggcctgcgcgaagaaaggcgttaaactgagggcgcatagcagcagccagggtaaaaaaccgacacactttttcgatttcactgacgtacctgagaaaagtccatttcgttgcagttcattccatgaatacaaaaacgtaaaaatacatcgctaccggaacagcgccagctacaagggatacccaggttgggcgccgcaaagcgtcacccaacattcaaacgcgctcccggccccattccccattcactacggcacccggcacgagcctaagcccgaggtcgtcgctttttcacgagtacaggttgtctggccggtcgtttcgttaaatgaacagtagtacttattgctttgaccttcatcttgcgacacatagtcccaggatgatgtcgtcggccattgcaacgtgccgataacgctctgcaacgctttcagatcgtccagcgaggctatattttcctgcgatccgcaaagatgcgtcaacgacgtttccacgtgttcggactgataataatagttcgtcccccagaattcattattaaacggccaggtatcccggggcgcggcagagagctcggctttcaggtacgggcggcgcagcgtaacgccgttcacctgcacggtatccggcatatgaccccagtatgacgcatacggcgtatccgggctggtttgtaccgtaaagattgcatctacgctcgccgcctcatcaaattgattcgcaaacgccgccgtgacagacgtttttaaccccagcgatttatcctgagttaacgtaaaccgcaacttaccgtcatcgccggtgaagccagaccattttgtgctgaggccattctggttattaaacgccactgccgtacccgcaggtgcaaccggcgccagcatcatattcgccggcgaagttgtaaacggaaccggctcgccaatcacgcctggttcaatgtattgcttatccaccgcaccgcgcgaataagcgtaatcacgcgtcaacagtacggccaccccggcctgcggctgcccggcgtcgttagtcaccgttaccgtcatcggtatcgtttcgccttttttcgccacggccgccgatttatcggcgttccatgcgtcggaagagagcgcgatattcagcccgctgcgcgatgttgtcaggcagagttgtaagtagtagttacccgggttttccgacatgctgtagtttttccccgtcttgagatctttatactgccagtaaagggttgagcctttcagcaggctatcccccgcccaccaccgcttcccgacgggcaatccaatatcggtcgccaccttgccgcttgggtgatcgttgtacagcgcagtgaaatcatctatcgcagccatctggttcatcggacatccgccgtaattaccggtattaaaactattcaccatgatccagttttcattggtttcgaaataggtatccgtgtgcgcctccgatgagggctcgcctgccaccagcgggcgcttaaactccgcaccgttgctggcggtgaaggtctccggcatatggccgtacatgttggccttgtcgctgtccgggctggtgaggacggtgaacaccaccggcagcgatgaggtcgccgtcggcgtatcgttcagattcgcggtcagctggtttttcaaccctatgccgccgggttcggcaagcgtcagggccagcgtaccatccgcgccggtggcgccggtcagaaccgatgtggcatagtaaaactgttgctgcgcaccggtgagcggcgtcaccgtcatgttggtgccgttagtggctacaaatttattatagtcagggttgcgcgccttcccggcgtcacgtttaagcgaaaaagtcgcataaggcaccgggttgcccatcgcatcggtagtggtgatgagtagcgggatcgactcgctgtttttcgccttcaccgcctgaatagcgtcatccatcgcctgcggggaggtgagggtaatctgcgtggcctgcggcagcggcgtcgtggcgcaaatttgatactgccaggcagtgctggtcgcgctgttttctgaccgacgcgaaccatcagccagatcgactgcgtaatagaagtcaagttttgccccgctggaaaatgacgtcgagttcgatccgctccagtaagaatagtagaccggccagccctgggcggtatttatcgttcggctcgggtatttgctgtagagcgaatccagcgcctcaacggcagggtaatagcccgccgcgcaacgggccggattggccccttcactggctggcccatgaaaaaccgcccaggtttcgttggtttcttgcttagacgcagtattgtccgtactggacagctcagcgtacagcagcgggcgctggtacaccgcgccatccgccgccgtcagcgatggcgccatatgcccccacatgcgggcaacgctgacatccgggctggtgacgacggtaaagatagtgtcgatgctggcactcacggcggcattttcatacagcgtcgcgttaatcgcggtgcgggtgccgtgggtgtccgggcgggtgacgctgatgatacgggtgccgtcagtgccggtctgcgaccccattttggtggtggtccatgccagcgattcgccgtcgatcaccacgggcgtcacgatgccttgcagatcgtcaccgtcctgagcggtatacttttcgccccggcgatcgtaaccgtcgccgcgggtgagcacaaacggcgcttccgggatcgggttgccgctgacgtccttcaccgtcaccttgagctgcatcgtctcgccctttttcactttgaccgcgtggacgtcgctgccgtcgtaccactgcgacggattgaccggttcaatggtgatggacgccgccaccgggttatcgctggccaggcagctggcgtaaatcgagacgttgctgttggcaaattcactgccgttcgtcagcgcgatcagtttccaggtggtggcgctctggtaggtggacgaccagtagttaagataggtcggccagccctgaatgctgtgaatcttgccgccgctgttggcgttatacagcgcctcaagctggtcgatgcgcggcaggcggttcgccgcgcagccgcccgcatccgggttgcccaccgcgtcgctatgggccacgcgcgcccaggtctcattgctctcgtcctgggtacgcagcgggttgctcacttcacccgccagtttgggccgctcaaaggtccagtcgcccacggtaatcgtgtcggccatatggccccacattttggccgctggcgtatccgggctggtggcgacggtaaacttcacgctgcgggaaaccggcgtgctgattaatgaatcgacgggcgcaatatttaacggcgtcagcagccccacgccctttttctgggtgaggataatggtcgcatcgccgttagcgtcggtgatcccgtgataaacctgcccggcaacgtagcccacgtcgtcaaactgcatctcgccgttgctggtatcggtaaagccggtcgtcagcccgtcacgccgcctgccgttcgccatggtgatggtgaagtcggtattgccgatcgccatgccgttaagggcgttgcgcgaatggatgttcatcttaacctgttcacccactttggcgtcggcgtttttgatcaccgggtcgtcgttgaagtagacgtccagcaccgccaccatttcattggccgagcaggtcaggtagttgggcgtatcggtaaatttgccgctatcgccgttttcgaggttgacgtgtaccgtcccggaggcgtcgctgtcggcggcgatgaaataatcttcagtcggccagccgtgctcgctttccatctgtccgcccgcatgttcgctgtacaaatgcgccagcgacgactgatccggcacctggccgacaccgcactgcgcggtggccgacgccacggagttaaacgtcgcccactcttcgttattttcgctgaattggccgtctttatggctggcctccaccgccagcagcggacgtttgtacaggttgcccgcgtccaccacgccgcgcatatggccccacatgttggcgccgtccacgtccgggctggtgaccacggtgaaaattacgctaaaggacagctcgacgttgccgccttcgtcgtccggcatcacgatgcggatgggcgtttcgacgcccaggccgctgttatgttttaacgtcaggtgcgcctggccgttgacgtcagtcacgccggtatagtgctccggcgacgaggcgctcataccttcggaatcaacggtgacccgcaggttatcccatgcgtcctgatgttcccctttgcggtttttcgccgggtcgataaacagctccatgtagcggtaaggcagcggtttttgcgtgtcccggtcaactacggtcatcgtcagatcaatcgactcccccacctgcgctttatacggtccttgtggggagagagtaatctgcgggtgcgccgcaggctgggctttatccacacaactgaccagcagcgtgtcgctgtcggcggccctgacgaccgatgcgctgttcatatgtacggcagcgtggtagccgctcagttggtttttggtcgatgaccaatattcagcatcgcccgccaccggccagccggtccaggtttccagcgtgctgtgctcatgtcgcatctgcaccagctgttcggcgtccggcagaatgtcacagtggttatccgcgccgctccaggtaaacagcgcccaggtttcgttggtatcgacgacgcttttgtcagcgccgctcgcttccgccgccagcttcgggcgggtgaaggtgtaggttataccgttcagcgtcgcggtagcgctctctatcatgtggccgtacatactggccttatcgctgtccgggctggtgatggtggtgaaaatgacggcggtttcagccgtaagcgccggaaagttgaccgagctgacaaccagcggcgttttgacgccggggccttccttctgggtgaccaccaccgtggcgttgccgttggcgtcagtgacgccgcgatattccgtttgggtggtcgtgagctcggtatcgccaacgcgaaccgggttggcgttattgaccacaccctggcggttttccgcatctttacggcggatgacaaacggcgcgttgccttcgggcgtgccgtcgcacgctttggtggagatggtgagggtgatgctttcccccaccttcacttttgatgcctcaaaggccgaatcaacgtgatcgccgctgactgtaaccggcgtgtcggtggccggtttaatgttgagcgccactttcgggcttaacagcggaatggtcgcataattcggcaccccggtacgcgtaaagagccacagcgcgggaacgttggtttcatcttccacctgcgcccaggccaccagctgtcgcccggcgaggttttgggcgcaaaaggtcaggttcggaaccggctgcggcgagagcggcgtgtcgggcgtggcggcatcggcccataccaggcccatggcgggcggctggcggttttcccaggcgatggtgggcggatcgctaaagagatcgccttcggtatcggtggaattgaccgcccgcatcgaggttgaggtagcatccgcgctaaaatcgcgcggcatggcgctgaattcaatatcgtgggttttgctcgggtcaagcagcgtacttccctggtaaagggggataatagcgccgtcggccagcggcgcggtgccgttaaccgcaccggtgactgagttcagctcttgccaggttccgcccttcaatagcgcctgcgcaggtgcgatcgacactgcaaacatgatcagtaatgtcagtaagaaatgtacaactttattcacttgccgattcctgtccatgagcgatagccacccgttttcattctctgtcgtaattcaacccactttgcttagcgcgcggctaagcaaagtgcgcggaaaataccactccccgcggggagtggtatgttgaggacaacttatttgcgtttgtagtcgatggacagaccaaagccctggacaccgtcgctacccacggtaacgccgccgtctgctccctcgaacgccgttttcgcttcggcgttggtgacagggatgacaaggtctttatcgttccagctttcgttgacgataccgccggtaccggtacctgcaattttactggtgccgacgaatttccagcggtagtcatactggtcggtaacgttttcaccggcatcataggtaccgttgccgttcttatcgctccacagcaatacctgataggtggtattcgttttgagtgtcgtccctgaattcttcaacaggttggtattcgaatctttctcatgaataaccacatggacgttttcatccaccaccggaccttccggaatttcgtcatcatccgaaccaccgcccgcatcggtcgacaggtctttcaacagcagttcggttgccacggcagggtcaccggtggtagtggttggcgtgattttgataccgatataacgatccgcatcagcggcctggatttcataactgtcaccagtaccaagatctttggggtcgctgccattctgatcgctaaagctcacccatttcacggtggctttagttgccgtgttgtcggtgtccaggtcgccttccgtatcgccaatcgcccagttcaccgtgaccttatcgccaacgtggaactgcttatcgccttcggtcacaattttacgatcgccgcgatcgatagttaccgttacgtgatctttgtcggtatccgcagttttatccgccgcacgggtaatccacggcaccgtaccctgaatggtgcccgtctgttcagagacaatctgccactgccccgatttcagattaccgtttgccgccaccgctggcgcggcgcaatacccggcaactactaatgctaaagcgaccttcgtcagccgccgttttactgttgcttgcattcagactctcctttttctcaaaattcagcggctggctggtcagccacaacgctgacgctatttctgactatacgtaacgcgtatgccgtaaccctgaacgccatcttccacattggcggcaaacttctgcgccgcctctttattggttactggcaggacaagatcttcattcatggtgttggccagcgcgccggtatgtccgtttgtactctgcccggtaaactcccactggtagtcgtacagcgccatctcttcttccgtgagctgctcggacatctggaatacgccgtctttatttttgtcgcgccacagcaggaaacggtaagcattattgaccgtagggtgcttatcttctttgccgataaggttgacagggttggcggctttgacctgataaatcaccgcattcagcgcgctcaggttgtcgccgataaaagtgacatcaacgtagttactgtcgccataggcgtctgctttcgccttccagcggaaagtccccggcagggtgctggaaagcgtcaccgtccccgcttctttgtcacgactggcaataaacacgcagggggtttccgtggtgcagggcgtctgggccagggtgacttttttatcattgctgtcgtacaacacgggcgtcatggcatcgtccaccagttcgttaccattgcgatccgtggagtcgccaaaggaatcggtgatcagcagatccatcaccacgccgtcttcgccatcggccagcgcgctggcttcatggctgtgatcgctgcgatcggtatcggcaatgttgtcgacgatcagctcaattttgcgatcctgctggacggtgatttccaccacgccggagttctgcttattgcccttttcatcttccagcgtcatgcgtactttccaggtgttcagggcggtgcgctgctcttcggtatcggcattaacccaggcaggaagcaccagattccagctgttattgttgccttcggttaacgcattagcttttaccaccggcatcaccagcgtacgggcggcgttgtttttcgcctgccaggaggcagaaataattttgtaatggtggttaatcagcgcgttgacagtccatttgcacttttccagaccaacagcggcctcaggcgtatcttcaatcacgcattccgggtgttcattggtggcgtcagccttcagccacaacgtgacgtccagcggatctttctcacgatattcgagaatgatgaaattgttacgatcgacaaaatcggtgcggctgcccattaaggagtgctgaattttaacgttttccggatcgagctgcgccgccagcggcgtgcctatctggtagttcacggtcgcgttaacgctaaagtcgttactatcgccagtaccggctttgtaatccgtaccaaccgtgaccagcggtaccggcgtatattccagccccaaagtgacggcatgaggatctttttgcagattatcggtgccaaacagcgctacttcatcgccgtagtactgttcgtaaactaatttagcgccaagctgcggataaaacggcagccagctttccatgcggatatcccagccgcgcgcgggtcgttcttcataaaagtcgaaatcttcggagtctttccagtcagaaagaggatggtaatagttgccggagaatttcaggtaatccgtccaggcttcagttcccagacctaatcgacggtgaccgcgcgtaaaatcgtagtcatagaatgcgttgccgccaagcagccagttgccgacgttctggcgaacgccaagcccaaagttaccaatggtgcggtcttccttacgctgagccgaaatctggctaaagaaaagcgtgctctggttgtcataccagggaataaaataatccagcgaactgccgtccagatcgccgccttcgcccacggacaggctggtacggatcttgccataaggtgacattacaccttcaagatatgactgtgctgaggaagtgatttggttttgcaaatagctacgcgcctgggattccagcgcttccggggtgagattatcaaagccctgggtggcggaattaataaagtagtcagcgccctgttctttaaaggactttcctttattttcctgttcttcttttttcgcggattcgctggctaaatcaggcagggaggagtggctttcatcatttgcagatgcagagttatctgcgccagaagccgcaactgagactccagacactaatagcaaaaccagaatgcgaatccttcgcaccatatgatatccctgtcgttaaataaaaacgcctctatgaaaagatattatatggatgattcagatggaatcataactaacaggcctaaatatattcctaaaaagaaaagtttaatatgaaacagatttataatattgatataataaataaaaagaaagctgttatttatttctaatattaattttcgggaataatattccctataaatagttgaatcaataaaaagaataaaataaccgccgggcaggatactatgctgatattacgggagtatcgaataacgcttttgcccttagccggataagacgtcggcgcctctgctctgcggcgcaacgtcgacagcggttttattgatcggaaatgacgaaattaacccgtttttttgaaattaaaccatgaccgttctggcaaaaatagtccactgcgccgcaggctttcaaaacctgtaacggctggcggcagtcaggacaaagtgcctgtaacgagaaatctttagcgcatgtctcgcaatgcgctgtatcgccattgcgctccagcgcgtgatggcaaacggggcaggttatttccataacattctcctcaggcgcgtgacttacttttacttgaaaggcctgatagcgcagcgcttgtcaggcctggaatattactgaaaaagcattacttgcttttcttgatatgtttcatcagacgcttacgtttgcgcatttgcgttggcgtcagtgtgttacgcttgttcgcatacgggttctccccttctttaaactgaatgcgaatcggcgtccccatcacttccaacgacttgcggaagtagttcatcagatagcgcttataggagtctggcagatcttttacctggttgccgtgaatcaccacaatcggcgggttatagccgccagcgtgggcatatttcagttttacacggcgaccacgcaccagcggcggctgatgatcttccaccgccatcgtcatgatacgggtcagcatcgcagtgctcacccggcgagtggaactgtcgtaagcctcgcgtacggactcaaacaggttgccgacgccgctgccgtgtagcgcagagataaaatggacgcgggcaaaatcaataaagcccagacggaaatccagcgtctctttcacctgctctttgacttcctggctcaggccatcccatttgttgactacgataacgagtgagcgcccactattgaggataaagcccagcagagacaaatcctggtcggagatcccctcgcgcgcatcgataaccaacagtacgacgttagcgtcttcaatcgcctgcaacgttttaatcaccgagaacttttctaccgcatcggtgatttttccgcgcttacgcacccccgccgtgtcaatcagcacatattcccgttcgtcgcgttccatcgggatataaatgctgtcgcgagtggtgcccggcatgtcgtataccaccacgcgctcttcaccgagaatacggttagtgagtgtggacttacctacgttcgggcgaccgacaatcgccagctttatcggcaggctttgcgggtcaaaatcatcttccggcgcttcttcaccattttgttccgcctcgaactgcgcccagtattccgcgtcttcatccacctcttcctgcggcgcgacatcatccatccacggcagaagcacatgttccagcaggctcaatacgccgcgaccatgtgaggcggcgatagggtaaatttcgcctaatcccagcgagtaaaaatcgacaaccgcctgatcgggatcgagaccatccgttttattcgccaccaggaaggtcggtttttcacgggagcgcagatgtttggcaatcgcttcatccgccggcatcagaccagcgcgcgcatctaccatgaataacaccacatccgcttcttcaatcgccagcagcgactgttccgccatccgcgtttcgacgccgtcttcggtgccgtcaataccgccggtgtcgatacagataaactcgcggccttcaacctccgcacgaccgtacttacggtcacgagtcagacccgggaaatccgcaaccagcgcatctcgggtgcgggtcagacggttaaatagcgtggattttccgacgttagggcgcccgacaagcgcgaccacaggtaccatgtttaaagcctcatttaaaaaatcatcagacaacgcgcgtcatttttacgccgttgttaaaaacaggaaaacggcccctacaccaggagccgttttttaaaacacacaaccgtgacgattaacgcgtaatcgcgtagaccgtaccgtctttggcctggatgagcagtttaccatccgccaccgtcggttcggtcagaaaaccggaactgtctactttttgttgggccacaaaacgcccgtcatcgacattaatccagtgcagataaccttcgctatcgccgacgactaaatcaccattatacagcaccggggaggtcagcaaacggtgcagcaaatcgctttgcgtccacagcgttacgccgccgtcagtggtcagcgccagcacgcgatcgttctgatcgaccaggtagatacggtctccgtcgacgataaagtcattgaccgaacccagctcgcgtttccacataatctgaccactgcgcagatccagcgccgttaagttaccattatacgccaacgcgtaaacgacgccgtttaccacaaccggcgtggtatcgacgtcgctcagacggtcaatttccgttgggccagtggcctgggagatacgctgctgccaaatcatctgcccttgttgcatcagcacggcgctgacgcggccattatcaccaccaacgatagccgcgccgaacgcggttgccggcgcagattcgccgcgcagcgacagcgaaggcatatccaggttcaccgtccatttaatggcgccatccgcctgatttagcgcctgcaactgaccgttgctggtatggataagaacgattccatcactgacaaccggacgagacaacgcttcgcctgcgaccttcgtctgccatgctgtggtaccgtcgctggtattcagcgcataaacctcggccttttcactgccgatatagacgtgaccgcccgcgacagtgacgccgccggacaacaacgcggacgaacgagagaaccagccgtctttctcgcccagattcacagaccagatctctttgccatcatccgcattgagcgcttttaccacgcccgcgcgatcggctgcatagaccacgttatctaccattaccggatgaaggttagaataaaattcgccaattccgttaccgacagaggtgctccagacagtggtcggggtaaactggttttcaacctgcggtaatggagacatcttgacgacatcttcttcgccgctaaacagtgaacagccgctgagcagggtaacggaaagcaaccctggcagaagtaatttacgcaattgcatcgggtccctctcagatggacaaattattgattttcatctgcatcatttcgctcaacgccggagaagcatcgctattgacgcccgcttcccatgcgctgcgcgcgccttttttatcacccttactcagcaacgcttcgccgcgcaaatcagcgacaatggctgtccatccttcgcctttaacggcatccagagttttcagcgcggcgtcggcttgcttaagctgcaactgaacgcgagcgagacgcagattaatcaccgctttgagattttcatcgctggtggccgccaacccctgctgcaactgggcttcggcttttttaagttcattcttatccacaaactgctgcgccagttccatagacgccagcgcaccataggtgtttttattctcagccgcgaatttttcagcggcgggaatgctatccggcttatcggcgcttaccgccgtcaccgcattttgatacgccagagaagcagcacgcgcggactccgtctgatggctgctccagtaacgccagccaaccagcgcgccaacccctaaaatcactccgacagccagcgctttgccgttttcggcaaagaagcgtttaatcgcatccacctggtcgtgttcgttctcgtaaatttccacgctgtccttctccttagcccaataaagtgcgcaaatgcgcggcgacgctgtcctgcgccactgccgtttgctcaccggagcgcaaatccttcactacaacagtcccatcggcgacttcagattcgccaagaaccagtgcaatacgggcgccccacttatcggcgcgggcaaactgtttcttaaagttgccgccgccgtggtttgtcattagcttcacgcctggcatttcatcgcgcagccgctccgccagcgtcattgccgcagactgcgtttgtgcgccggcagccaccaggtatatatcgacaacaggagaggcaataaattccggattaactgcctgaactaacaaaacaagtcgttccaggcccatcgcaaagcccactgccggggtagcgcgaccgcccagttgttccaccagaccgtcataacgaccacccgcacagacggtgccttgtgaccccagactgtttgttacccattcaaatacggtgcggttgtagtaatccagaccgcgtaccagacgctggttgacggtgtaggcaattcccgccgcgtccagcaatttacacaggccggcaaagtgctcgcgtgaatcgtcatcgagatagtcgccgagagcgggcgcgtcgttgagcagcgcctgcacgtccggattttttgaatccagcacgcgcagcggattggtatacatacggcgtttgcagtcttcgtccagcgtctcttgatgctgttcgaggaacgcgaccagcgcatcgcgatagttcgcacgcgcctctaacgaaccaatagagttcagctccaggctaacgtgttcagcgatgcccagcgcgcgccaccagcgtgcggtcagcataatcagctccgcgtcaatatccgggccttgtaagccgaagacttcggcgcctagctgatggaactgacggtagcggcctttttgcggacgctcatgacggaacatcggcccgatataccacaaacgctgttcctgattgtacaggagaccatgttcgatgccggcgcgtacacagcccgccgtaccttcagggcgcaatgtcaggctatcgccgttgcgatcctcaaaggtgtacatctctttttcaactacgtcagtaacttcaccgatcgcacgtttgaataacggggtctgctctacaatcggcaagcggatttcactgtaaccgtagctgccgagcacgtttttgagtgtgccttcaatgcgctgccagatggcggtttcgccaggcagataatcgttcatgccgcgaatggcttgaatgttttttgccacgtttattctctttctgaatataaaaatgaaccctcagcgcttccccgaacgaaccgggagccatgcgggttcaatcatacacgggaagcgcgccgcttcccatcacgttcttatttttcaacctgcagcacgtcaatccgacgcgcttcatcaagttgacttgctttcgcgcgaatacgggattcaagctgcgcgatcatatcgtcgttatcgagtctgtccttacgcacgccgtcttcatacaggccgcttttcttattgccgcccgtcacgcccagcgtcgataccagcgcttcgcccggcccgttcactacgcaaccgatgatcgagacgtccatcggggtgatgatatcttccagacgctgctccagcgcgttcaccgtgccgataacgtcgaactcctggcgagaacaggtcgggcaggcgatgaaattgatgccgcgcgcgcgaatgcgcagcgacttcagaatatcgaaaccgactttgatctcttccaccgggtcggccgccaacgatacgcgcagcgtgtcgccgataccttccgataacagcagacctaaaccgatcgccgacttgaccgccccgctacgcgcgccgcccgcttcggtgatccccagatgcagcggctgatcgatctgtttagccaacaaacgataagactcaacggcaaggaatacatcggacgcttttacgctcactttgaactgatcaaagttgagacgatcgagatgatcgacatggcgcatggctgattccagcaacgcctgcggcgtcggctcaccgtatttttcctgcagatctttttccagcgatccggcgtttacgccgatacgaatagggatgtttttgtcgcgcgcgcagtccaccaccatacgaatacgttcttcgttaccgatattgccggggttgatacgcaagcagtcaacgccgtattccgctactttcagcgcaatgcggtagtcgaagtgaatatcggcaaccagcgggacgttaacctgctgtttgataagcttgaacgcttcggcggcgtccattgtcggtacagaaacacgaacaatatctgcgccaacgcgccccagcgctttgatctgattaaccgtcgcttccacgtcagtggtacgcgtgttagtcatcgactggacggcgataggggcaccatcgccaatcggcacattcccaacgtaaatacgtgtcgattttctacgttgaatcggagcctggttatgcatgaaaaacctcccgcgttacccgtctgttactgcgccggtgtcggttcggcattaagggtcagacgcgcaacctgattagttctgataaagcggctcagatcgacaggttttccttgatactggatctgcaccgcggccggcgcgccaattttaagtttataaggcgcctgaccggttaggtttaaattaccatctttacgctgcataccgctaaacagcttcttacccgtggcgtcagtgacttcgagccagcagtcagcggtaaaattcatcaccagcgcgttcggatcggcagcaggcgccgctacgccagcctgactggtcggcagcgcggacggcgtctccgttgccgctggcgcggcagatgtcgcagccgtatcgacattcgcctgcgaaggcgcgactaccgtattttgcgtcgccgccgccgttggcgctggcgtttgcgtcgccgccgtcgaatcaaccggcgtcgcaggagccggagccgtttgcgctggcgtcgtatcctggcttgtcgcggcaccggtgtccagcggtacgctttggccgctgtctttatctgcgttcagttcagccgtgctttgatcggccatcgtcgtgatctcttcctgctgcgccttgtggttctgccaccaccaggcgccggtcagccctacgaccacaaacagtaccagccaggtaaaagacattaaccagccgtcgcgttttttacgacgctttcctaatgagaaactctgcatcggggcgactttagcggcgcgcagcggagcttgtttttccagccccggcagcagttcctcttctggaacatgcaccagacgcgcatatgagcggatatatccgcgcaggaaggttgaagcaagatcggacggcgccttatcttcttcaatatcgcgtaccgtagaaaccttcaggcaaagtcgctcagcgacagcctgctggctgagtccgagttgttcacgggcattgcgcagacgaacgccggtggtttgtgcttcattttggtcgtgcgtggcttcagtattcattcgctacagctacaggtacgtgtaaattaggattcaggcgccgacgagccgtaatgcccgcccacaccgcgaaacatcaggttagttaaccttagtcagacagtataagcctgtcaggccgcagatgacaaaaccgctaagacacaaggctaaactcttgttgcaccattacatactgccttaaagtcgacaaaaacgcaccgttattattgaccagacaagtacaacgccagacattattcaactgacattgcgccacggtataatgaatgccccgtggcgcaactgctatcaaatagccttgatgtcaatcacctctccctgcatacgcttacgcagggtacgtttggtacggtcaatcacatcgccagccaactgtccgcatgccgcatcaatgtcatcgccacgcgtcttgcgtacgatggtcgtgaaaccataactcatcaaaaccttagaaaagcgatcgatacggctgttagagctgcggccatacggcgcgccagggaacgggttccacggaatcagattaatcttacaaggcgtctcttttagtagctccgccagttgatgcgcgtgttcagtgccgtcgttaacgtggtcaagcatcacgtattcaatcgtcacgcgcccctgattggcgttggatttctccagatagcggcgaaccgcgcccaggaacgtttcgatattgtattttttgttgatcgggacgatttcgtcgcgaatagtgtcattcggcgcatgtaaggagatagccagcgcgacatctatcatatcgcccagtttatccagagcaggcaccacgccggacgttgagagcgtgacacgacgtttggacaggccgaaaccaaagtcatcgagcataatttccatcgccggtacgacattggtcaggttaagcaatggctcgcccatccccatcatgaccacgttggtgatcggacgctggccggtgactttggccgcgccgacgattttcgccgcacgccagacctgaccgataatttccgatacgcgcaggttgcggttaaagccctgctgcgcagttgaacaaaacttgcactccagcgcgcatcctacctgtgaagagacacacagcgtagcgcggtcgtcttccgggatatagaccgtttcaacgcgctgatcgccgacagcaatcgcccacttgatggtgccgtctgaagaacgctgctcttcaacgacctccggcgcgcgaatttccgcgacctcttttaatttgccgcgcaacactttgttgatgtcggtcatctcatcaaaattatcgcagcaatagtgatacatccatttcatcacctgatcggcgcggaaaggtttttcacctaagtttttaaaaaactcgcgcatctgctgacggttgagatccagcaggttgatttttgtttctttgttaggaactaccggggtactgctttcaggtgtgacaatttgttcagacatatgctattccggcctcgttattacacgttatggcccctggagggttgaaaaaagaaacgccccggtaagcttactgctcgtccgggggcgctgcattgtacaaattctggcgtaaggatgccacgtctgcacgcggcattagcaaaaataatatttgaaccgataatttatcgccaacgcatttacagcgtgaaagacgaaggagattaacgggtgcgcgggcacacttcgccttcaccgaagaaaaaggcgatttcgcgctgcgcggattccagcgaatccgaaccgtgggtgccgttttcagttaagctatcagcgtagtcggcgcgcagcgtacccgccaacgcgttcgccggattggtggcgccaagcagatcgcggtgacgctgtaccgcattttcactttccagcacggataccacgatagggccagaggtcatgaactccaccagaccgtcaaagaacggcttgccgtcgtgctcagcatagaagccgcgcgcctgctcaacggtcaggtgcagcattttagtgccaacaattttgaaccctgcagcttcaaagcgcgcaaagatgctgccaataacgttttttgccaccgcgttgggtttaatgatggaaaaagtccgttcaatagccatgtttacctctgaaatatgttctgttgttatgtcaggcgcggattataaagagcatcccatcaattgcctatggatgcaggtaacatttttttaaaataaaatgagcattagcaacaaaagttaaaggcgcacagcaaactcaggggactgacacagcacgcagtgcgtgtgttcaggcgtgagagcatgaaaagtacgtttgcagatgtcgcaggtgagcgtatacgccgtactatgccgcgttgaggcgggttccacgtcaaaccgcagccgcagcgcctgatgcggacataccgccgcacagccgccgcatcccgtacaacgcgccgccgctatcgtcagggtattgtcgtcaaactggataacgttttccgggcagcttcgccagcaggcgccgcacatcctgcactcttgcggactgatttcgggtacgcattcgctgaacgcggaaaacgcctgtctgagacgccgtttccccggctcgacggcgcacggggtaatggcgtcgcgcggaacatgaaacagagtgcgccgcgaggcgttaatctccgcgccgacaacgtgtttgaaagaccagcccggctcgccgtagcggcgcagcgctaaatttagcctcgccagcgccatcagccactgcgccgatcgctccaccgcaatatcaataaagcgaataccgtactggctgtgccagagaagcagttcatcgaccattggcgcctgtagcgaaaacggccccaccaacgtatccccctgcacaaagcgtttaaccggtttgataccggtaatggcgtcaacaggacagacaaacagacagtcgccacaggctatgcagcgcgtcgtatctatgctgacctgcccctgcgccagcgaaaacgcctgcgccggacaaacatcggcgcaagcgcggcaggaagaaaaacgaaagcgacgacggacgcaggcctgcgtcacgtctaccgccggatcgatcgtcaggttaaccatcagccaatactaaagaagacgtagcgcagcataatctcgccgagaagcagcaatacgctgcccgccaccagcgtccctctggcgtttcgcagaccgcctgcggcaaagcagagcattcccgccgctgagacacaccagccgagaagatagacgtcacgcaactgcgccagcgcctgtagcggatgatgcgggaaagtgacgaccgtcgtatccaccgcattaatatccgccagccatagcggctgcatgatcaggcgaatcagcaccatcagtgcgaccaccaccacagcgcagcgcattgcggcgccagcgttgcgcagataagccagcgcaatgactaccgagccgataatgcctgacgtgccaaagaacagcgccagcgtgttgctatgctgccaggtcgccaccgaggcatggatataaacctgcgccatgcagaatacatccaccagcccaaacgctgccgccagcgccagcagcggctgccagcctggctttcggaaaaacagcagcacaatccctagccccagcgccgccagataaaggctggcaaagacgatttcgcgactcagccacgaactggcgacatgacgtaacgcatttagcgcattcaggggatagcccatgtgcagcgctgaagcaagcagccccacgcaggccagtacaaacgcccccgccatcgcgggaagcgcgccgcgtgcaggcacgcgtccctctacggcgtactggcggcccaacgccagccacactgtcacgcccacggacccttgcaaacagagcgtaaaaatcagcagcggtaactcatgcatggcgtttaccctctttttctgcgccctgatgcgctttgacaaccagattaggtttggttatggatgaatctggcagcccgttaacgtcgcatacgctaccgtacttcgcgcgcagttcatcaatcggaccaaacttgatggcctccagcggacaggtcgcaacacagacgggcggttcacctttcgccagtaaatcaacgcacatgtcgcacttagacatttggccggtctgctcgttaagctgcggcgcgccataagggcaggaccaggcgcaatagccacagccgacgcatttgtcggtatcaacgcgcacaatgccgtcacccgggcgtttatgcatagcggtagtcgggcaatttttggtgcagacagggtccgcacagtggttgcaggaaatggaaagcgtataagcaaatacgttattgctgaccccaccctgcccggtcgggatgaaacttccgcccttgacttcatagacgcggcggaaacgacggcctacttccagattgtttttgtctttgcaggccacctggcaggctttacaaccggagcagcgtgaggagtcgatgaaaaatcccagttgtttatcgctcaccggcgggtaatgtgtaaactgactcatgctttagccacctccaccagcatggtttgatgtgaatttcccttcgccagcgcggtaatacgggccgagctgaggacgttcgcacagccgcctttatcaacgccgttttcatccggctgccaccaggcgccagcctgcatcgcgacaacgccgggaataatgcgcggcgtcacttccgccgggatttcgcaaatcccgcgtgagttatgaatgcgcaccatgtcgccatgcgtaatgccgcgcttttgcgcatcctgcgggttgatccacaatgtctgctgctgcacttcaatcagccacgggttagcgtattgcgttgagttggcgcggttttttcctttccacgtaattaactggagcggaaaatctttcgccagcgcatcctccgggccttcatgcgcgggaacgtagtgcgataacgccgggatttccggatgctgcatgtcgtagaggcgcttcgagaagatctctattttccctgacggcgtcgggaacggatgattttccggatcgcgaatattgtcttcaaaggcgataaatggcgcgcttttgaacagatgctgacgggtcttttgcagcgtggcgaaatccggcagattttcgtccggcatcgccaggcgcgtctgttcccagatgtgttcaatccacgctttctcatcgcgcccctggctaaattcattctcaatgcctaatttcgccgccacctcacgtagccagtcgtagtcggagcgccgctcaaattcaggctcaatcagtttttcagagagtatcaggtagcttgccgtgccccaggtttcaccgatgttccagcgttccataaagctggtttccggcagcagtagatcagcgtatttcgcgctcggcgtcataaacagatcgctggcgacaataaactggatctttgattcatcctccagtacgcgtaccgcctggtgcagatcggggttctgattcgccagatagttcccggccagcgagaacagaatacggatgttactgtccagcttatcggcatctttcagccccatatccggcgtcactttgctggcgtcgtctgcggcctgcacccagttcatcaccgaaattttggcttttaccgggttatccggcatctccggacccgcggcgaatttacggttagcgcagccgccgtaacccgcagcccaaccgcctttgatgccgacattaccggtaatggtcgccagtagagtcgaaccgcgcgcggtgcgctcgccgcagttgtggcgctgtggtccccacccctgaatcaacgcggcgggtttggtattcgcgtaatcacgcgctaactggcgaatggtttgcgccggcacatgggtgatcttttccgcccactcgggggacttaacgacaccgtctttggcgccggtcagatacgccaccagcgattcgttagccggtacgccttccggcattgagtcttcatcaaaaccgatagcgtaacgcgcaataaatgcgcgatcgtgcagattctcgctgatgatgacgtacatcatcgcgtccatcagcgcattgtcggtggtgggcagcagcgggatccactgatccgccagcgacgaaacggtgtcggaatagcgcggatcaaccacgataaaccgcgtaccgttctgcttcatcttctgcaagaaatagttggtatgaccaaaaatggtctccgtcgggttatggccccacagaatcaccagtttggtgtccaaaagcgtatccagtgaactgccgctggcggcaatgccgtaagtataaggcgtcgcggccgccgtgttgcccatactcacagaatggtagctttcgagatatccgccggtcagattcaacaggcgacgtgccattttatcgccggaaaaggtgccgccggaaacggcggtaccaacatgaacatagcgcgaagccgggccatatttttcagtaatcgattttaaattatcggcgattaaggttgtcgcttcatcccaggaaattcgctcaaattttccttcaccgcgttttcctacgcgcttcatgggatatttaagtctgtcaggatgataaacaaatttacggtatgcgcgtccacgaacacaggcacgcatcaccggcatttgcgcatccagcgcattatccggtcgcgttgaaattcgcgtcacgataccgtcactaacatgcgcccgaatatcgcatttgcccccgcagtcaaaagtgctgcatgtctgaacgactttttccgcaggcctgttttcagttgccgtcacagcgcgcgcctgagcggtagctggcgaggagacaaacggtaacgcaataagcgcggagctggcctggataaagtggcggcgagaaatagcgggctgttcgccatttccctggctttttatatttttcatgatccgactcgtcaaataaaaacccattctcacgtttttatgcgctggttctcttgatatttatcaagctccctcattaagggtaattccggaaaaattaataattctcattaactttaaattaaatgaaattcataatttattctgaagagttgttaacgtattaattcaaaattaaccgctgcaacctgaccggactcatccattacgacaagttgataacgtccagcgatattgagtaataaagaaaggcgattattttcgccattaacaggttcgccatttaaaaaccaccagcgacgccctttgccgccggtagtcgagacgggcagcgtgacgttttcctggcctggcaattgcctgatcaccgcgccatccctcactcctgacagcattaacggcgcggcgtcattgccctgtagcggcggacagtggtcggacgccgcgggcaagcgggcgctacgtctttccgcaggcggcagccacggctccagcggccgcggccagacgataaacgtatgcgcacgcgcctgcggacagtcggcagcgacacgccgccccgtatcatccagccagaccgggaaacgaataccgttgatgtcttcctgctcaggtaacagcagcgtgggcggctggctgtcatcgagcagccatgtcgccagtcggcggcgacagttgctgtctccggcaggcagagtctgtccgcccggccagcaaatgacgccgcggcttaccgcctgcggacgcggatcttccggcaggcgtcccgtatgcgccagtaacagattattgacctggttaagcaatggcaccgcgctggcaaaaccaaattgccccaccacaggcgtgccgtcgggtctgcctgtccagataccgatgatatagcgcgcgttaacgccaatagcccacgcatcgcgatagccgtaactggtgccggttttccacgccaacggcacaatgcgcggcagcgcgttatccggcaagggttgcgcttcatccgccataatccgtcgaatgatccacgccgctcccggcgacattaatggtctttccgacagcggatcgtccggctgtaaccgtagtttcgccgctttcccatgacgagcgaacgcgctgtatgccgccgccatctcgtcaagccgcgcgcccgcgccgcccagaatcagcgaaagattgggcgccgcgccagcaggcaaatatagcggcaggccgacgttacgcagttttgccgcaaatcgtttcggcccataggcttcaagcacctgaacggctggcagattcagcgagcgtaccagcgcgtcgctcatgctgaccgggccgtgaaatccgctgtcgaagtttcccgggcggtaatctccggtacggcgcggaacgtcctgtaataatgatgcgggatggatcaagccgtcatccagcgccagaccatacacaaagggtttgagtaccgatcccggcgatcggatcgccgttaccatgtcgacatgaccaaaacggctgtcgtcattaaggtctaccgatcctacccagccgcgcacgctcatatcggtatgatcgacgacgatcatcgccaacgaactgcgtgcaggcagccgccctttccatgcccgcgccagatcttccagttgccgctgcaacccggcgtccagcgtggtcacaattttgtcgttctggcttttactcaacatcattcgggcaaaaagcggcgccagttgcggcatttgacgcggcgccagccagaccggttcttcacgcgactcgcgtaccgtttcggcaggccagacgccctgcgccgccatccgatccagcactttatttcgtgccgcttcggctctcgcaggccagcggtcggggcgtaaccggctcggcgcctgcggcaatacggccagcagcgccgcgtcagcgtagctcaggcgcgcgggcggcttgccgaagtaggcccagcttgcagcgccaataccctgtagcgtgccgccgaacggcgcgcggttcaggtacagcgtcaggatatcgcgcttggacaaatgccattcaagctggagggcgcgccaaagctggcggattttaccgccgaacgtgcgcgaatgcgggtccagcagtctcgccacctgcatagtcagcgtactgccgccggaaataacgcgcccggcggtaagatcctgccatgccgcgcgcgcgacggagaaagggttaacgccagggtgccgccagaaccagcgatcttcgtaattgattagggcctccaggtagcggggagagacctcttcaatcgtcaccggataacgccagatccccccggcgtcggcaaagcgccacagcggcgtaccgtcatgggctaccacgacccgcgcaggatggacctcattgagcggcagcggccagagtttatccgctgcccataacgccaggaaaataaaaagcggcgcgcccgccagccacagccagcggccacgtttaccacgccaaccgttcatttaaggcgtcacaatcagcagcccctcgctcgcgccggttgcccgccactgaggcgcatacatcgattccacctgcggttgcgcaagctggtacgtccccggcgttaccgcgcgcgccaggtagaccagcgtcacgggctggccctcattgacaacgacggcagccacaaaccgatcgtcgcggaattccatatactgaatatccgcctgctgcatctgattaagcagattttgcacttcgctaccgctctccggcaggctggcgctgctgtcagccagattctggttttccagctccagcccggccgggagcaggtccaccaccagcgcatccggcacattgcgatcggccactaccgttaaccagaccagcaccagttcgccgctacgcaacgaggacagcgatttacgctgaccatcggtccccagtatttgtcgttcaatctgcaaaacgttgctggcaggctcaggcgcagatgagggatagccgctgctatccagacgcagccatagcggctggctaccggtgttcgtcacctcaagggcggccagctggtcagcatccagattacgggtcagcgccttgtcgcccgacagcggctgcgcctctaacgaggtctgcacctgccaggcgcccgcgctggcctgtcgcgaatgcgcggcgaggaacaaggcattgttctcctgggtagagagccagcgctgaccgaaggcctgctcagaaagcgagcttaatagcgcgttttgcgcgtccggtctgaggttgttctcttccagtagcgacaacatcagagcgttatcgcgcagagaactgccgtaatccgctatccattgccgttcgtcctgacgcggcgtattcagagccagcgtaatggcctcttcgccgcgtctggcatcacccatcgtgtttaacgcgatgcccaattgcatcagcggcagtcctgaagccgcctgactacggcgctcccagatttcgcgcagcgtgccgagcggcgctttctgctgacgcgccagtaccagcgcagcgtaagcctgagcggcaaaagtactggcctgagtattatcgctataacgaatcagcatcgtaccgggatcctgcagatagcgcagcagtcgctcattgccccggttaatggcctccggcgggacgctatatccctgctcgcccgcgcgaataaggaaatccatcgcgtagaccgttagccagggctcttccgccccattttcatcccatagcgcaaaaccgccgttatcacgctgcatctgtagtatccgggagatgccgatatctaccgcagcgcgccgtttttcatcgctatcgccggtaataccgagcgactgcaattgagcggcattggtatacagcgccgggaataacccactggtggtttgttccaggcacccgtacggatatgctttcagctcgcgaatgtagcgcgccagattgagcggcggttttccgcttaacagcagttgtccctgtaacgtggctggcgagatgtttgccagatgctgctctggtacatgccagctctctcccggagccagcgcaatgccgctatttaccgtttgggcaggccaggccggacgcacgccgatttgccactgcttatgctgcgcgtcgagggtttctcccggcagattcagaccgctaatggtcgcctggatttcgccttcgccaaaaccttccagcgcgcgtaccggaacgaataaggtggtgcgcacgcccggcgccaggttgaccggttgcggctgctggctaagcagttccagtaacccactggcggcgagcgcaatattcagcgtctgcggacggtcggtcagattggtgacgtccagcaccagtcgcgaaacatcccctcccgccagaaaacgcggcatattcagctcggcaatcactggcgcggcgacaacgactttgctttcgccgcgaccaaaatcgtccgctgtccatgcctgcgccataacccgcagttcgccgttaaagtcgccaatcggcagcgttacgaccccttcgccctgctcattgagcgtgatcggctgcgcctgctgcgcgatgatattgacatggtttaccggcggttttccgccgcgcttaaggtcgtcgccatcgccgccaaaacgcaacgccgccagccgcccctgcccttcaatgacctggccgtaaatatcgtagatatccgcaccgtagcgtttttgaccgaagaacgcctgccacgggtccggcgtcgcgtaatcggtgatgttcaatacgccgctatcgaccgcggagaccagcacgttgatctgttttggcatttcgccgtgtttaacgctggctttaaccctgacggtgagcggctgattcgggcgcattttagccgggctttccagcgccagatcgaggcggcggttgtcatcccccagcggtagatgtagtaaccccacggcgcgttttggcgtcgcggaacgagatttatcgccgggacgcaccaccagcgtactgagatagagatcgtggcgattccaggttttatccaccggaatcgtgagctccagcccctgcgccggcacgtcgatcgcctgccaccacagcggaccatcgctggactccaccatcgcataacctttaccggcgaccggcgcggcgatatgcaatttcatggtatcgcctggacgataattcgctttatccagtttgagggtgacgcgatccggacgcgccgcgccgctaccgtcgctgttatcctgccagctatagccggcccagaaacgaacgctgctgaccgtctcattcggcgctttgacctccagacggtacgcgccccattccaccgggaagctgacttttccggtttcatccgcgttcagatccagcgtctgctcgccctccaccagatctttttgatcaaactgcgactgccagccttcgctttccgaccagttccagtaatagtcgcgacgctcgcggatgagccgcacctgtaaaccggacaccgcttttttctcgccctgcgcgttggcgtaaacaatatcgaatgcggcgttgctgtcttcgtcgacaatcggttgattaacggtggtatccgtacggtagtcgtataccgctttggcggcgaactgtggacgaattcccggtaacgtatcggcaggccaaatcgcctgctctacgcgacgagtgaccggacgaccgccagactccagcaggctggcctgtagaattacctgcagcggcgaatgcgcttcttgccactggctggcagcactcacttcaccacgtccgcctttatccaacgtcagttgaacttcgtccaggctgcgcgaaagattctcttcggcaatattgccgaactggaagccaggcaacgccgcgacagcgtcgcgcaggggacgcaggaaaagttgcccttgcagggtattgccgttagcaggcgcgccatacaagtaatagccgacaacggagaatttcacctcatccgcaggcgccagcggtgttttttgcgccgtcaggttgagcgccatccgctccggcataaagtcttccacgtggaaatcccaactccgcagcaaattatcgccggtgttggcgcggacatgccacaagccggtcggcgcgttgatatccagcggataattcaaacggtatagcccgttttccggctggctgacgacggtacgcatcacctgtccgtctggttttaccacttccagcttaacgggttgatcgggcagcgttttaccgtcgctatcgcgcagtaatccgttgaggataaccgtttcgcccgggcggtagagatcgcgcgggccgaacataaagaactgcttgctgtagccgggcgcgccagcgacattaaattccgacagatccagagccggaagcgtgagatcgagcagcgtggtctgctcctctttacgcgccagtaatagcgccgccgctttatcagcctccagttgcacatgtccctgcgcgtcgctcgtcgcctgcgccagcgtctgccctttatcattcagaagaacgatctcaattcccgactgcgccgcgccgttttccaggctttgcgtaaagatatccagccgattatggtaacggtgcgcggacacgccgatatcgctaagggtaaacaacgtagcggcattactatagttgtagtgtccagcctgattcattaccgccacatatacgcccgcctgttgcagcggcttaatatcgcttaatggcagcagcagtttctcacgcgtattgcgcgccggattaagatcaaaacgaccggtataaaccagatccgccattttcagcagattgtcggactcccagttagagagagaactacggtactcccactggctgacaaatgacgccagcgatccgggcttaacgcggaaaaagttcacatcaacgtggttgacgttaagcgccatgaccggcagtccttccgcgattttccccggtagcagcgatccccggctggcaaagccgacgctgggctggacatcacgcgtggtaatcgttttttcataagacttgccgaaggtggcgttattcagcgccttaacggcgggatcaaccgtgaccaccagcacgcgctcaggttccagatgacgtaaccttagctcttttaaatttggcgccagctcccatgcgccgtcaacgctgccgcttttcttatcaaccacgtgaaccacacgggagaaatcctgttcaggatctaaaggaattgaaaacgtcagcaccagcgtcgccgcgccgtcgagctgcgcttcggaggcgtctaatagcgtgagcgctttgccctggctttgctgcgccagcttttgtagctgtgccgggtcttgcgcgggcgagggctgcgctacggctggcgcttcgcttttagtcgtcggggcggttttatcgttgttatcgcatcccgccagcgccagcatgatcatgcaggccaccacgcgtaaatgtttcatctttcatccctggccttaacggcctgtcagcaacggttgatgagatattatgcgcgagaaattttattgtgtaagtccgtattactgtgatgatgcgaaaattttacgcagaaatgtggtttcgccagccaaaacagcctcttctacttgtcccttttcgggaaacgtccgacaatttgaccataatcaggtaacaatggagatgcccatgaccaccgccttttttgtcgccgccgactggcttgccgaacatattgatgatccggaaatacagattcttgacgcccgtatggcgccgccaggacaggaacatcgtgatatggcgggcgaatatcgcgccggacatattcccggtgcgctgttttttgatattgaagcgctctccgatcgcgcatcgccgttgccgcatatgatgccgcgcccggaagcgttcgcggtagccatgcgtgaactgggtgttcgtcaggataaacacctggtcatatacgatgaaggcaatctgttctccgctccgcgggcatggtggatgctgcgcacgttcggtgccgagaaagtgtccattctggcgggcggactggcgggctggcagcgcgacgaatggctattgcgcgaaggcgaggaagcgcatgaaggaggcgagtttgaggcgaaattcgcgccgcaagccgtggtgcgtctcaccgacgtattgctggcaagtcatgaaaaaaccgcgcaaatcgttgacgcgcgtccggcggcgcgttttaacgctcaggctgatgaaccgcgtccgggactgaggcgcggacacattcctggcgcgctaaacgtcccgtggacggaactggtgtatgagggcgaattaaagaccactgacgaactgaatgaggtttttttcagccacggcgtgagtttcgacagaccgattatcgccagctgcggttccggcgtgacggccgcggtcgtggtgctggcgctcgccacgctggatgtgcctgacgtcacgctttacgacggcgcgtggagcgaatggggcgcgcgtaccgatttaccggttgaacccgcttaatatccgccatgccggatggcgctcacgcttatccggcctaccgttcaggctgatgtaaaacgatctacagacattgtttttattccgctcttttccgctgtcctgcaaacgggcattattttctcttaataaaatcctattttttatcggtaaatactttacgtccggtataaggagtatcattaccgctgtttttgttttcaccggaaaataactcctgtaaatataattttttaaggatggaaaatggatatttcactcactaatttaattgagttggttaaaaaggttaaccgtaataaggtacctactcctatgtctgccgaggaaataagtcgtctgcgagtgcgtaagtatcgcgatccgcaaaatacggaaaccactgagttacctgaaagcctgaaggcgctactggcctacgaccgcgatctcctgagcaattataatatgcctgtgattgaaacattacaaaaatctattgataacgagggagtaattcattcttactcccctgatgaagaggcgtattacggcgttggcatggatagctcaggtattgatattgaagatctgatgcctgtctggagtaacgatccccgtcttccggcattaattcgtatcgatcatgtcggcgatcaggccatttttatctatatcacagaacgggatgccaacggcgaataccctattgcccgcatggaacgtaatgaattctggctggcggagtcttccctggtggaatatctctataatattatttcgggcgctaaagacattggctttaccgaagaggatttacatcttccgcaatggaaggcacagcaaaaaatgaatgaacaacgcgatgccgctttacttgacctggaggattatcatgaggcgttttgggcaaaactggacgcgctcgtcgattaatcgacatgatgtcgggtggcgctcacgcttatccggcctaccgttcaggctgatttaaagcgaatctacataaattctgtttaagcaggccacaaaaaaaccgctacaattgagcggttttttttgtgctggtccggttcgcggcctttccagcaggctttgttgccatagcaacgcaggcacaccgtaggggattaatactcccttttaagggagcaaatgtcaatatgatttaccgggaaactattcaatatttgaggtattatctttcccggccctttccgccgtctcgcaaacgggcgctggcttcaggagaggataacccatggccgtaagcgcaggcacaccgtagtgcctgctatcacggcattatcgccagcggtgctgccgtgatgcggtcttcgcaaggaccgcaacatgaaggtacgatgcttttgtgtcgtgcttcttgtttctggcacgttgtgtcttcacgcagacagaagctacccaggtaattctgttcccgtaacgctcaacgtccagagcaggtaagccaggaggccgccctgttgggcggctttcttttcttcagatgatgcggttctgtttaaaatcgcgcaggaacccgccccagcggcgctcgtagaacggcgcgatatgctcggtgataaagtggctgataccctgctcgcccttcctcacctgacaaatatcgatcggttcgtcacccggtaacgtgtcggtcgccacattgcccgctgcgtgaatgatctcttcaatttcgccgtcagcctcaatgccaatcagcagattgggttgggcgtccgcatgttctttaatcgcgcagagaaacgcgcgtttcaccggtttgatggttttaaacagcgtagtgagggaatcaatcatctgcgacggcggctcggccacttcggatagaataagcgactcgccgccttccagcacttcctgcgtacttaacggactgccttcctcagcgagaagcaggctgatttcacgcggcataaactctttgccggtcggcaatttagcgttgaggaatagcgtttcgccaagcgtcatttcaaacagcgtgcgcgccggcatcaccacaaacgcctgttcgtcttccacggcctgctgcagcgcctccagagaagtaaagaagggaatgacggtcgtgccgtcttctttttcccagtgctgcaaatccagagcgctgtcttccacaatcgcctcgccttcggcagcgctgcccggcacccagacggtggactccagtaaggtacggaaaaatgccggacgatgcgcgggctcagtcgccgctttctccagcaagatttctaattcatttttagtttcggacataggaatcacaaattatgtatatgggttgtaggcctgataagacgcacggcgtcgccatcaggcaaaatgccgggtggcgcttcgcttacccggcctacaaaaacaccgttcaggcggtcagcaaattcgcgatggtgcgcacacccagaccggttgccccggcagcccactgctcaaccggcgctttgcgataagtggcggaacagtcaatgtgcagccagccttcgcggtaattttcaacaaagtgcgacaaaaaacccgcggcggtgcttgccccggcgggataagccgcgctgccggtgttgttcagttccgcaaagttagacggcagctggttacggtggaactccgccagcggcagacgccagaacggttcattttcttgcgccgcgctggtcaacaagcgccccgccagcgtatcgtcaaaactgaatagcgcatggtagtcgttacccagcgctgttttcgccgcgccggttaacgtcgccatatcaatgattagctgcgggtgttgcgcgctggcgtcaatcaggccatccgccagtaccagtcgcccctccgcatcggtattcatgacttcgacattcttaccattacggtagcgaataatatcgcccagtttaaacgcattgccgctgatcagattatcggcgcagcacaggaacagttttacgcgtttattcaacccacgggtaatggcgaacgccagcgcgcccgttactgtcgccgcgccgcccatatcggatttcattgagtccataaaagcgctttgtttgatactgtagccgccggagtcaaaggtgatacctttaccgaccaggcaggcataaaccggcgcatctttgtctcccgtcgggttgtaatccagcgccagcagcaccggcggacgctcagaaccacggcctacggtatgcaaccccatatagttctgctcgcgcagatcttcgcctttggtgatacggtaagtgacgctatcgcacgcgacgctgcacagcagatccactgcgcgctgcgccagttgctccggcccaagctcttccgccggagcattaatggtgtcgcgcacccagtcaataatggtcaggcggttatccagctcctgacgttgggcatcgtctaaatccggccacattacggtacggacgccttttggtcctttgtaacccgcccagaatgcccaacaacgctcggtatcccatccttcgcctgtcagcgcgacctgttttattcccaggccgtcgattttacgcgccgcacgctggatcaatcccagatcgtctttaccgttaagatgcaaggtaataccgtcgttattaatactgtaagtggctttatcgccccagcgcgcatcggcaggctgcgtggaaagcgtaattttcatggcttctgtcattgttattttccttattagcaaacgggccgccgtagggcagcccgttagatcttttgctaaatgattcgcgttgcaggaaggcggcaagtgagcgacaaattcgtcgggaacgaatttgcacagccaaaggctgcctctggtgagggacaaggatgtccctcatcatccccgggagcatagcaaactatgtgactggggtgagcgaacgtagccaacgcacctgcggcgaggatcatgacgcaaaaattactctgcttcatccaaccagactagcagaatcgcctccagaattttttcattggatgcgttagggtcgtcgtcaaaatcgtccagttcgcagatccactgatgcagatcggtgaaacgaacggttttaggatcgacatcaggatatgcgtcgtataacgcttcgccgatctcgcggctatcggtccacttgagtcccatactaccctctgttaatgctcacgcgcatggttgattgtgtaacgtggaatttcgataaccagatcgtcgtcggtaacgcgggcctggcagctcagtcgactttccggctccagcccccacgctttatccagcatatcgtcttcttcttccgaactttccggcaaggagtcgaagccttcacgtacaatacagtgacaggtggtgcaggcgcacgatttctcacaggcgtgttcaatctcgatgccgttgcgcagcgcaacgtcaagaatggtttcaccggtctcagcttccagaactgcgccatccggacaaagatcctgatgaggcagaataacaatcttcggcatgttaaacctcgtctacggaatggcctttcaacgcgcgacgaaccgactggtccatgcggcgagcggcaaattcctgggtttgtttatctacgtttttaatggcttgttctatggcgtcaacatcatcgccttgtgcgaccgcgcttaaatgtgcggcggcatcatcaatgcattgacgttctgcggcgcttaacagcgcggcgtcggcagttagcgcgccggtcaaactttccagcacgcgcgcggcttcgactttttgctccgccagcatacgcgctttcacgtcctgctcggcaaaactcatggaatccttgatcatcgaggcgatttcgccatcggtcaggccataggaaggtttgacctgaatggaggcctcgacgccggtggatttttccattgcggtgacgctcaacaggccatcggcgtctacctggaaggtcacgcgaatatgcgccccgcccgccggcagcggcggaatcccgcgcagcgcaaagcgcgccagcgagcggcagtcctgcaccagttcgcgttcgccctgcatcacatggatagacatcgcggtctggccgtctttgaaggtggtgaaatcctgcgcgcgcgccaccgggatagtggtgttgcgcggaatgactttttccaccaggccgcccatcgtttccagcccaagagagagtggaatcacgtccagcagcagcatttcgctgtccggcttgttgccgaccagaatatcggcctgaatcgctgcgccaatagcgaccactttatccgggtcaatagcggttaacggcgtgcggccaaaaaattcgcccacccgctcacgcaccagcggtacacgggtcgaaccgccgaccatgaccacttccagaacgtcctggggctcaacgccggcatctttcaatgcgcgacggcaggccaatagcgtgcgcttaaccagcgcggaaatgagatcgttaaactgctcgcgagtgatctccccctgccagcccgcaacgttaacgcgaacggtatcggcatcgcttaaggcgattttcgccgcaatcgcggcatccagcagttcgcgctgaacgcgattgtcgctacgatcggcaattcccgcctgctcacgaatatagtccgccagcagatggtcaaagtcgtcgccgccgagcgcagaatcaccgcccgtcgccagcacttcaaacaccccgcggctcaggcgtaaaatagagatatcgaaggtaccgccgccgagatcgtaaacagcaataacgccttctttgcctgagtccagaccgtaggcaatcgccgccgccgtcggttcgttgagcaggcgcagcacatgcaggcctgccagccgcgcggcgtctttcgttccctgacgttgggcatcatcgaaataggcgggaacggtaatcaccacgccatccagctcgccggagagcgattcgctagcccgcgcggccagcgctttgagaatatcagccgatacgcgcaccggattgagcaatccagccgccgtgtcaatcatcggcagcccattaacgcttgccttaaaccggtaaggcagatgcggatagcgcgtctggatatccgccagcgagcgtcccatcatgcgtttcacagagctgatagtgttggccgtatcctgcgcggcattgtcacgcgcagcgtaaccgaccgtatggccctgctgctgatagtgaaccactgaaggcaacaggtggcgcccttcgtggtcaggcagagtttccgcctggccgctgcgaaccgtcgcaaccagagagttggtagtgcctaagtcgatgcccgccgccagacgacgctgatgcggcgcggcgctcagaccaggctcactaatttgtaataaggccatgttagattccagttaaaaatcgagcagcttttcttcgagttgttctgcgctgcttcgcagtttatcgagaaaccgcagtttgcgcaccgtatccgccgccgcgtcccacgcggcgttgtccaactgttccaccatttgctgaagacgagcatcaaacatcttttgtacgcgtttgatgaagctttccagccgcgcgtcgtcttttgattgttcgatatcgtccagctcttcgcgaagcgtgagttgttccatcagaaacgcggtgtcgcgtaccgtatgttgctcgctggccagatcgaacccgtgtaaggaaagcagatactccgcgcgcgtcaaagggtgacgcagcgtttgccaggcctggttgatcgtggcggattgctggacggcggcaagctgctgcgcctgagtgccgttggcaaatttgtcagggtgatactggcgttgcagatcctgaaaacgaaggctcagcgcctgggtgtcaatctgataacgggctggtaagccaaagagggtgaagtaatccataacattctcagggatagcctgtcagaacaaaccccacacgcaggcgaccacggtggggttataccttcttacttcgcgccgcagatgcgttgtctgcgcgggttcccccagtcatttactcaagtaagcgccaggggattcactcgcttgccgcttttctacagcacgaatgctcggtataacagcggaacacggttacacgtggaagctttcgccgcaaccacactcatctttcacattcgggttggagaatttaaacccttcgttcagaccttcttttacgaagtccagctgtgtaccgtccagaaattgcaggctcttgccgtcaaccactaccttaacgcctttgtcttcaaacacggtgtcttccgccgttggctcgtcaacaaattccagtacataagccatacctgagcagccggaggttctcacgcccagacgcagaccaaaccctttaccacggttggccaggaaggtattaactcgcgctgctgcactgtcgctaagtgtaatcgacataacaaaacctcaatgttaacgttctattttatttcgcttcgcgtttgcttttgtaatccgcaatagcggctttaatcgcgtcttccgccagaatagagcagtgaattttcaccggcggcagttccagttcgtctgcaatgtcggtgtttttaatcgcctgcgcttcgtccagggatttccctttcacccactccgttaccagagaactggaggcgatagcggaaccgcagccgtaagtcttgaagcgcgcgtcttcaatgataccttcatcgttaactttaatctgcaacttcatgacgtcgccgcaggccggcgcgccaaccatgccgcttcccacgttatcgtcgttgttgtcaaacgaccctacgttacgcgggttctcatagtgatcgattactttttcgctgtaagccattataaattctcctgattccgataccgattaatgatgtgcccattcgatgctgttcagatccacaccctgcttgtacatttcccacagtggagaaaggtcacgcagacggccaatggatttacgaaccagatcaatggtgtagtcgatctcttcttcagtggtaaaacgacctaaagagaaacggatagagctatgcgccagttcgtcattcatgcccaacgcacgcagcacgtaggacggttccagactggcggaggtgcaggcggaaccggaagagaccgccaggtctttcagcgccatgatcagcgactcgccttcaacgtagttaaagctcacgttgagaatgtttggcgcgccctgctcaaggtcgccgttcaggtaaacttcttcaatatctttgatgccgttccacagacggttacgcagaccgcgcagacgggccatttcggtctccatctcttctttcgcgatacggtaagcttcgcccatgccgacaatctggtggacaggcagagtaccagagcgcataccgcgttcgtgcccgccgccatgcatctgcgcttcaatgcgaatacgcggcttacgacgcacatacagcgcgccaatgcctttcggaccataaattttatgaccggagaaggacatcagatccactttcagttggctcagatcgacaggcagtttgcccacgctctgggtggcatcaacgtggtagatgataccgcgcgcgcggcacatttcgccgatggtcgcgatatcctgcaccacgccgatttcgttgttcacgtgcatgatggaaaccagaatggtgtcgtcacgcatcgctgcttcgagctcgttgagatcgatgatgccgttgcgctgcggcgccaggtaggtcacttcaaacccttcgcgctcaagctgacggcaggtgtccagcaccgctttgtgctcggtcttgctggtgatgatgtgcttgccttttttctgataaaagttggcagcgcctttaatcgccaggttatcagactccgtcgcccctgaggtaaagacgatttcacgcgggtcggcgccgaccagttcagcaatctggttgcgggcgatatcgacggcttcttcagcctgccagccgaaacggtgtgaacgagacgccgggttcccaaaggttccgtccagggtcagaaactgcatcattttctcggcaacacgcgggtccaccggcgtggttgcggagtagtcgagataaatcggtaatttcattgctcttaaactccgtacatcactcaatgcaaggaatcaggcaaccggctggatgtacgaccgtgttgacgggacgtccgcgtcccggcctgattctgaattcttttttacgcttcatccttcagacgaccgcggcgttcaccgcatgaggccgccagaagagatggcgtaatattttaattaagcgcgtaatttaacgtcgatagcgtcctgcgcacgaccgctggcgcgcggcgcgtcatgcgtgtgctggcgaccagacacatccagaacttcctggttattcaccagctcgcctaaggtaatattgttgagaaaaccggtcaggcgatcgcttaaatcacgccacagcgcatgggtcaggcatttatcgccgccctggcagccgcctttgccctggcaacgggtcgcgtcaacggattcatcaaccgcgctgatcacttcgccgaccgcgatactgccagcatctttacccagcagataaccgccgcccggcccgcgtacgctggaaaccagaccgtttttacgtaaacgggaaaatagctgttccagataagaaagggaaatcccctgacgttcagaaatatcagccaacggtaccgggcccgcttcggagttgagcgcaacgtctaacattgcggtcacggcataacgccctttagatgtcagtctcatgtcttacttaacctcaaactcgcccctgcccggggttttttattgtaaaatgggggtattgcatagcagggacaagtctgacattcccgagtaatttggtcaactatttacttgagtaaattagtcaggtatttagcgttccgtgcgatattgacgcggttacttgcctttattctgctgctcaatagacgccagaatcccacgcagaatattcaactcctggctttccgggcgggcgcgggtaaacagacggcgcaatttattcatcacctgccccggatggttttcgcgaataaagccagtggagagcaacgtttgctccagatggccgtagaagcgttcaagatcgtccaccagcggatacggcgtctcttcatgatctgccgcgtcgccgttttcctgcgtcgccagccaggccatgcggacttcatacgcgatgacctgtaccgccatcgccagattcaacgagctgtactccgggttagcggcaatagcgacgtgataatggcatttttgcaactcatcgttagtcagcccgacacgctcacgaccaaaaaccagcgcaaccggcgtatttgccgcttccgccacgctttttaagccgcactcgcgcggatcaagcatcggccacggcaaagtgcgggaacgggcgctggtgccgaccaccaggctacagccagccaacgcttcatccagcgtatcgacgatctgcgcattaccgatcacatcgctggcgcctgccgccagggcgatggcctgggagtccggtttcaccaacgggtttaccagccacaggttagttaagcccatggttttcatagcgcgagccacagagcccatattgccggtgtgggaggtttccaccagcacaattcgaatgttttgcagcattgtctttcttcagctaaagattattctgacatcttaccataaaaccaagacagattccgatctcgctgctatactctgcgccgttttcccgttctttaacatccagtgagagagaccgatgcatccgatgctgaccatcgccgtgcgcgcagcgcgcaaggcgggtaatgtaattgccaaaaactatgaaactccggacgctgtagaagcgagccaaaaaggcagtaacgattttgtgaccaatgtagataaggccgctgaagcggtgattatcgacaccattcgcaaatcttacccgcaacacactattatcaccgaagaaagcggtgagcacgttggcacagatcaggatgttcaatgggttatcgatccgctggatggcaccaccaacttcatcaaacgtctgccacacttcgctgtttccattgctgtacgcattaaaggccgtactgaagtggctgtcgtgtacgatccgatgcgtaacgaactgttcaccgccacccgcggtcagggcgcgcaactgaacggctaccgtctgcgcggcagtaccgctcgcgatctggacggcactatcctcgctactggcttcccgttcaaagccaaacaatacgcgaccacctacattaatattatcggcaagctgttcaccgaatgcgccgatttccgccgcaccggttccgccgcgctggatctggcctatgtggctgcaggtcgtgtcgatggtttctttgaaattggccttcgtccgtgggatttcgccgcgggcgaactgctggttcgtgaagcgggcggtatcgtcagcgatttcaccggcggtcataactacatgatgaccggtaatatcgtggcggggaatccgcgcgtcgttaaagccatgctggcgaatatgcgcgacgaactgagcgatgcgctgaagcgctaagtctcttcggcggatggggccactcatccgccgtgccttttcaggcgtttttcctaaacacagcctcatcgctttacttgcctgcatgtttttgtacgatcgctccctgctccgctattggcataaagcggcaaggaagcgaacatgacccttcaacatacccgacgcatcgtcaaatccctttttattctgtttatcattgtggtctgtatttatctgctaccccgcgtagcgatcaatgccttttattacccggacaataaagtctatgggccaacccctgccgaagctgaatccattacctttaccgccaaagatggcacgcatctgcacggctggtttattcccactgctttcggcaggccggaaaacgccgtcgcgacggtgattcatgtccatggcaacgccggaaatatgtcggcgcactggccgttagtcagttggctgccagaacgcaacgtaaacctgtttatgtttgattaccgtggttttggcgaatctgagggcaccccatcacaagaggggctactggacgatacgaaaagcgcgatagattatgtgcggcatcgcgccgacgttaaccccgagcgcctggtactgctggggcagagcctgggcggcaataatgtactggccgccgtaggccactgcgtaggctgcgcaaatatgcgctacgccgaccaggcgggcatacgtgcgattatccttgactcaacgtttttatcctattcctccatcgccaaccagatgatcccgggcagcggctatttgcttgatgaccgctatagcgcggatcgcaatattgccagcgtcagccccattccggtattgattcttcatggcacggcagaccatgttattccctggcaggacagtgagaaattgtatgccctcgcccgggagcccaaacaaaaaatcttcattcctgacggcgatcacattgatgctttttccggacgttatgcaaacctttaccgtgatgcaatgattaaatttattcagaccgcgctatccgctaaatagcgcgacgctgtatatatgcatattttatgattaagaatatatttattataccgatagtaaaaaccattttttcccgttagcgaaggcggtggattagcgctagcgtaacagtaatattcaactgatttttataacaatttattttcatttgtttttcctgaatattactgtggagtatgtgatggctatcaaaattacgcctgacgagtttagtttgcttatccagcgattaaacaaaaaatggcgcgtgtttgccccgtccgcagagtttcgcggcggacgtttttccgacactgacaacattatttatcaacggattagcggctggcgcgatctcatctggcacgagaaatcgcacatgtcgccgaataccattatcgcccctatcaccgaaacgctcttttatttcgataaagacaccattcaaattgccgagacagacacttccccgataatcatctttgcccgcgcctgcgacattaacgccatgtcgcggctggattatatgtatttatcaaatgggaataattccgattacagttatcaactgctacgggagcatattcgtttcgtccttattgagtgtgaagaaagcttcgaaaattgtttctgcgtctcaatgggtaccaataaaactgactgttatagcgccgccatgcgttttagcgatgagggcgcgcttgtcagcatccgcgatccctttatcgaggcggcgatacaagggctggggcaggaggctgactataccccctctttcgtcagcgaaaaccgggaaaccgtcgtcacgccggacagcgtttgccacgatccgcaaaaaattcgcgacattctcacccaccatccgctatgggacgcctacgacagccgctgcatcagttgtggccgctgcactaccgggtgcccaacctgtacctgctatagcgtctttgacgtcgcctatgatgaaaatccgcagcgcggcgaacgccgtcgccagtgggcaagctgcatggtgccgggctttagcgacatggccggcggtcatggttttcgcgaaaaacccggcgagcgtctgcgctaccgcgccctgcataaggtcaatgactacaaagcgcgcaacggcattgaacatatgtgcgtcggctgcggccgctgcgacgatcgctgcccgcaatacatcaaattttctttgattatcaacaaaatgaccgctgccgttcggcaggcgctggcagaggaggcataacgcatgtcacattgttcctgtcatgataaaccgcagcacagtttgctgcctgcggcgtaccgcatcctcagtattactcgccacacgccgctggagtggaatttccgcgtggccgtcgattttcccgcgcactgggggcaatttgttgaggtgtcgctgccgcgcgtcggcgaagcgcccatctccgtttccgactacggcgacggctggatagatctgctgattcgtaatgtcggaaaagtgaccagcgccctctttacgctgaaagaaggcgacaacgtgtggctacgcggctgctatggcaatggctatccggtcgatacgctgcgccataagcccttactggttgtcgcaggcggtacgggcgtcgcgccggtgaaaggcttaatgcgctatttcgttgagaatccccaggaaattggtcaactggatatgattctcggctataaaaatcgcgattgcgtgctgtacaaagaagaaatggcgacgtggcgcggcaaacataatctggtactcacgctggatgaaggcgaggctgatgaccgttaccagattggccgggtgaccgatcggcttgccgacatgacgcttagcgatatcgacactatgcaggccatcgtcgttgggccgccaataatgattacctttaccgtaaaaatgctgctgcaaaaagggctcaagccggagcaaatctgggtggactacgaacgccggatggcctgctccgtcgggaagtgcggccactgccgtatgggcgaagtgtatgtctgcaccgacggtccgatatttaactacgccgtcgcgcaacgttttgccgattaaggagaacatcatgagcattgatattgatatcattaaagcccgtgcgaaaaacgaatatcgcctgtcaaaagtgcgcggcgaagccatgatcagcgtccgcattcccggcggtattttgcccgcgcatttgctaacggtggcgcgtgacatcgccgaaacctggggcaacggacaaattcacctcactacccgccagaagctggcgatgccgggtatccgttacgaagatatcgacaacgtgaacgctgcgctggagccgtttcttcgcgagattgaaatagaactgtgcgacgtccaggttgaggataccaaagcgggctatctcgctattggcgggcgaaatattgtcgcctgtcaggggaaccgcatttgccagaaagccaacactgacacgaccggtctgtcccgtcgtcttgaaaaactggtctatcccagcccttatcatctcaaaacggtcatcgtcggctgcccgaatgattgcgcgaaggcgtcaatggccgatctggggattattggcgtggcgaaaatgcgcttcactgccgatcgctgtatcggttgcggcgcctgcgtgaaggcctgtagtcaccacgcggtaggctgcctggcgctgaagaacggcaaagcggtcaaagaagagtccgcctgtatcggctgcggcgagtgcgtgctggcctgtccgacgctggcctggcaacgtaagccggatcagctctggcaagtccgtctgggcggacgcaccagtaaaaagacgccgcgcgtcggcaagctcttcctcaactgggtgactgaagatgtgataaagcaggtgatcgttaacctgtatgaatttgaaaaagagatgctcggcggaaaaccgatctatctacatatgggccatctgatcgacaaaggcggctacctgcgttttaaagaacgggtactgcgcggcgttcagctcaatccggaagcgatggtcgccgaacgcatttactgggccgaagacgaatccgtcgcgcggatgcatctcaaacccgccgggcactaatcaaccacgccatggccgcagcccgcccacaggctgcggcacgctaaaccacatgaccagcgccgcgacaagcagtatgccccctccagccagcgccagcgttgaccagcctacctgccgccataacgccggcgctttgtttccactgagtttcaccgccagagcacgaaaagtgtgtaccagcaacgccagcgaggtaatcgttagcgaggttcccgccgccatcgccagtaccgacgccattccccagctaaaaacgccaatcactttactgaataacagcaccattatcgcgccggaacagggccgcatccccatagacagtacgatcatgaatcgcgcgcgccagtcatcgccgctatgcaattgttcctgcgtcggtagatgctgatgtccgcagccgcatttttcatggtgaacatggcgcggcgtaaaagcgataaagacaggtttacgtagcagcgcgcgtaacctttttatggcccgccagcacagcaaaatgcccagcccgccaactaacgcatagctccccttttccagccagaagccgctcagatggagctgcctggccggaagttgcaatacggtcagcacgcccaccaccaacccgatagccacgagcccctgtaataacgcggcggcgagggttaacacgatactcgatttcaacttcgaaggatgcgtcgccagccatgtcgcgatcaccactttgccgtgtcccggccccagcgcatgaagcacgccatacataaaactcagcagaagcaacgatccgcccgcccgctcaggatgcgtcgccaccgcgttaagcagcgcgctcaactgctgattcacgtcccgctgccaaagagcgcttttcaacatcacctgcggccaggcctgccacatccacagaccgccaaccagcatcagcagcaggaataacgccaatggccacagcgagagccagcgccgccccggagtgcgttgagaaaaaattactgacattgcaaggtcaccgtttgggcaaactgtttacctaaatccatatcctccggcggcgcgtcctctttatccagcgactgggcgaaacgtagcgtctcttcgccgggcgcaggagtataaacctgaatccgacacttttcgcgcagcggttccggcatcgtgatatcgctgtcctggtcataatgcatatcgacataataagagggatcaaacgttgaaaaggtataagtctgtccgcttaacggctgcggttcagccagcggtagcgtaaaggtcaataccgcctgatgcgcgtcacgcgtcataccgtattctgtcggcctgtttttaaacttcactttcgcgccattgcgccacacttctgtaaagtagtgctgcccaagtacgttagccatcacttccgccgccaactttttccatatttctgaccccggtgccgcgtttccggcgtcatacagcagatctgcggacgtcagcgcgtccattgtccagcgcatttttaacgccacaaattgctcattttcactgaccacctgcgtttgcagacggatgaagctgtgcggatgcgccgccgccacgaaagataaaacggcaagaaatagtgttaaggcgctgcgtttcactggcttcatctgttcctcgcgataaaaattctgtgacactcctcagcattcctggcctaaaagcacgcttatcacatttttcacacgcaaactttagctatccttaccagacaaactaacgggagacctgacagatgatgccgacaattgccccaccatctgtactttccgctccccagcgccgctgtcaggtattgctgacgcttttccagccggagccaattgccacggtggaaatcttcagcgcgcttaatggcgttgatgatgatactgcccgtgaggatatcactgagacaagcctggagatccagcgctatcatcgccttgccatcacaacatgccagaacggttgctatcggatcgaaggtacagcactcgatcagcgcctttgccttttacactggctcaggcgcggcctgcgtttatgcccgaccttcgtcacgcaacagtttaccccggccttaaaaaacgcgctaaagcagcgcggtatcgcgcgtccgctgtatgacgatattaatctgcacgcgctcatcaatctgtgcgcccgccggttgcaaaaaccatttgaacatcgcgacgtgcagttcctgcgtctctttttacagtattgtctgctacaacaccatgccggcatcaccccggaattcaaccctgtgcagcagatttgggcgcagtcgtgcgcggaatatccactcgcccaggaaattggtcgtcactggcagcgccacgtgatgcaggccgcaccgctcaatgaagcgctgtttatggcgttactgttttcaatgattcgcctccccgacccgattcgcgacacgcatcaacgggcgcagcaactgcgactggaggtggcgcggctggtgctgcgctttcgagaaaaagggaacgtacgcttcagcgacgaacaagggcttaacgatcagctgtatgtccatctcgcccaggcgctgaaccgaagtttattcacgattggcatcgataatacgcttccggaagagtttaaccgtctttatccgcgtctggttcgcaccacacgtgaggcgctcgccggatttgaagccgaatatggtatccacttttccgaggaagagacggggctggtggcagtgattttcggcgcctggctaatgcaggataacgatttgcatgagagacagatcgtattgttagcggataaaaatgatgcgctggagacgcatattgagcagcaactgcgtgaactgaccctgttgccgctgaatatcagacggatatcgctccaggcgtttcaaaaagagggatgcccgcgcggcgtagcgctgattgttaccccttacgccacgccgctaccgctcttctcaccgccgttaattcatgcggatcgcgccctcacagagcaccaacagcagcagatccgcaagatcctggaatcatgacgcggcaaccactttgggccgaaggaagatagcgggcaatgccaccagcgccataatccagaatacgccgccgcccagatgttgatacagaaaaccggcaaataccgtcataatcgcgatactgccgcccatcgccacagcggaatagacggcctgcaaacgaatcacctcgcttccctgacgcgcagcgatatagcgcatggcggccagatggcaaacggtaaacgtgccacagtgcaggatttgtatcacaatcagccacggcaacgccgtactccagcccatcagtccccagcgtaccacgccgcacacagcggaaagcaacagcaagtcgcgggcgctaaaccggcggaatagctttttactcagggcgaaaatgatcacttccgccaccacgcccaacgaccataaatagccgaccgccgatgctgaatagccagccccctgccagtagatggcgctaaaaccgtagtaggcggcgtgcgccccttgcagcaaacagacgcaggcgagaaaacgccaactttgtgccaccagcgtacgccaggcgggccagcctgcgctctcctgctgacggctttccccttgcggcggcacgctgggacgtaacaacatacccagcaacatcgaggcgacgccgagcgtcagtagcgccagaatcgcctggtaatcgtataaactcaccagcttaccggtcagcgccgaccctatcacgaaggcgatggacccccacagccgcacccgaccatagtccagggtaatttgcttttgccaggtattggccagcgcatcggtcagcggcaccagtggcgaaaagaagaggttaaacccaaccatcaccaccattagccacgcgacatgcgttcctgcccaaaatgccagcgcaaataccagcgtcagcaatgccaggacgcgcagcgcggagatcaaccgcgaaggatcgcttacgcgaggcgcaatgagcagactaccgagaaaacgcgcgaccagacccacgcccagcagaagaccgatggtttccggcgttagcccaagacctttgagccagacgctccagaagggcagaaaaataccgtaactaaagaagtaggtgaaataactgagcgccagccagcgcgtggaatgcaatgccatgattccctcccgtttggaggcgatagtctggcggtaaacggttgcgctggcaagggtaacataaggttaacaggcggagggagaagttcaaacggcaacgccgccggataatgacttccggcggcgtcacgttatggcgcataagtaatgcccgacagacgcagcgccatcgggccattttcacaacacaagcgcttatgcgtaaaccgggaagcgtgcgcagatatccagcactttcgctttcacgcgttcaatggtggcttcatcattgatgttgtccagcacgtcacacatccagccagccagctctttcacttccgcttctttgaagccgcgacgagtaaccgccggagaaccaatacggataccggaggtcacgaacgggctcttaggatcgttcggcacgctgtttttgttcacggtgatgttagcacggcccagcgcggcgtcagcttctttaccggtcaggtttttatccaccaggtccagcaggaacaggtggttctcagtgccgccagacaccactttgtagccgcggttcaggaacacttccaccatcgctttggcgtttttcgccacctgctgctggtaaactttgaactccggctccatcgcttctttcagcgctaccgctttaccggcgatcacgtgcatcagcgggccgccctgcgcgcttgggaagacggcggagttcagttttttatacagctcttcatcgccgcccttcgccaggatcaggccgccgcgcggacccgccagggttttgtgggtggtggtggtgacaacgtgagcgtgcggaaccgggttcgggtaaacgcctgcggcaatcaggcccgccacgtgcgccatgtcgacaaacaggtatgcgccgatgctgtcagcgatttcacgcatttttgcccagtcaaccacgccggagtaggcagagaagccaccgataatcatcttcggcttgtgctctttggccagcttcgccatctcgtcatagtcaattttaccggactcatcgataccgtaaggtacgatgttgtacagtttaccggagaagttaaccggggagccgtgagtcaggtggccgccctgcgccaggttcatacccagaacggtatcgcccggctgcagcagcgcggtgtaaacagcgaagttagcctgagaaccggagtgcggctgcacgttagcgtagtcggcgccgaacagttctttcgcgcggtcgatagccagttgctctacgacatcaacgtattcgcaaccgccgtagtagcgcttgcccggataaccttcagcgtatttgttggtcagctgagacccctgcgcctgcatcacgcgcgggctggtgtagttttcggaggcgatcagttcgatgtgctcttcctgacgtactttttcctgctccatagcctgccacaattcggcatcataatcggcaatgttcatttcacgctttaacatccgcatctcctgactcagctaacaataaaatttgtgcctgaaaaggcagtccgtgggacttcggccaacagtataaccgaatcattcttcgataacaggtcttgacaaaggtttttacgcaaacgattacctatgcgtcagataagggtttcctgaacgagagtctgacgaatttcaacggatttcttttcagctttgtgatgcagatttttcacgttgttacctccataacgtaaagcagagaagatccatttacaatgcaagggtatttttataagatgcatttgatatacatcattagattttcacataaaggaagcacgtatgcttgacgcacaaaccatcgctacagtaaaggccaccattcccctgctggttgaaacaggaccgaaactgaccgcccacttctacgaccgtatgtttacgcataacccggagctcaaagaaatcttcaatatgagcaaccagcgtaacggcgatcagcgtgaagccctgtttaatgctatcgcggcctacgccagcaatatcgaaaatttaccggcgttgctgccggcggtagaaaaaatcgcgcagaagcacaccagcttccagattaagccggagcagtacaacatcgtcgggacacatctgctggcgacgctggacgaaatgttcaacccgggccaggaagtgctggacgcgtggggcaaagcctatggcgtactggctaacgtctttattcatcgggaagccgagatttatcacgagaacgccagcaaagacggcggctgggaaggcacgcgccccttccgcatcgttgcgaaaaccccgcgtagcgcactgatcaccagctttgagtttgaaccagtcgacggcggtacggtggcggaataccgtcccgggcagtatctgggcgtctggctgaagccggaaggttttgcgcatcaggagatccgccaatattcactgacccgtaaacccgatggcaaagggtaccgtattgccgtgaagcgtgaagacggcggccaggtatcaaactggttacaccatcacgccagcgtaggcgatgtggtgcatctggctgcgccggcaggtgacttctttatgaatgtcgccgctgatacccccgtttcgctgatttccgctggcgtcggccagacgccgatgttagcgatgctcgatacgctggcgaaagaacagcataccgcgcaggtgaactggttccacgcggcggagaacggcgacgtccatgcgtttgccgacgaagtgagcgagctgggccgtacactgccgcgtttcactgcccatacctggtaccgcgagccgactgaggccgatcgcgcccaacgcctcttcgacagcgaagggctgatggatttaagcaaactggaagccgcgatcagcgatccagcaatgcagttctatctttgcggcccggtaggctttatgcagtttgccgcaaaacaactggtttcacttggcgtgaataacgaaaacattcattacgaatgcttcggcccgcataaagtgctgtaattgcaacaaatcctctgaaaaaacgggcgttatcgttaaggcgaacgcccgttttcctccccgttcccctgcttattgcgctgctttttatgcctttcttttacaaaaaaggggaataaaaaaagtctgtgcaaatcgtgttattattaacgtttgacttagctcgttagggcatctttttatgcagcaacctgttgtacgcattggagagtggctggttacaccttctgttaatcagatcagtcgtcagggacgccagattactcttgaaccacggctgatcgatcttctgatgtattttgcgcatcacccggatgaagtgttaagccgggataacattattgatcatgtctggatgcgcaccatcgtgaccaaccatgttgtcacccaaagcatttctgaactacgcaaatcattaagagatggcggagacagcaatgctgaatacatcgttaccgtacctaaacgcggctataagctgacggcgccggttatctggtgcgaagaaaatagcgatgagatcgataattcatcaacgtcgccgccgccgccgatcgcagcgacgaatgcagaaccgacggagggggttactgccgctacgcctgtgccgcccgcctctttgcaaacgccgactaaaaaggcgaaaaagccgcgtattgccgctttctggacgtgggtgatgttcctgctctcgctggcgacgctggtggtgtttatcgtgatgtcggtggtagatcataatgccgcggtaacaaaaacgcggttattacttaacccacgagatatagatgttcgttttgaaggcggcaattcctgtaataactgggtctcgcaggagtcctacgccatcggtctgggcggcttaatcaccgacctgctgaacacctactcgacttttatggtgcacgataaaaccaattaccgggtcaatgagccaagcagctccggtaagacgttaaccattcagtttgtcaatcagcgccactatcgggcgcagcagtgctttatgtctgtagtgctcattgataacgccgatggttcaaccatgctggataagcgttatttcgtcaccaatactaaccagttgtccatccaggatgatctgtttaatagcctgtctttcgttttaacacagccctggcctaatcgtatgcgagaacaactggccctgttcagaacgccgcaaaataccgcactgatgcgtttttatgaggcgcgccagcttattctgagcggcgatgcgcaggcgctaggtaaagccagcgatattctgaatggcattattaaggaaacgcctgatttcaactatgcctatgaatataaagtgctggtagatgtattacggcaatcacagcagccgtttgataaagaacaagtggccgcactgaacgaagagtttaaaaaaatagatcaaattccgggcgttgagaaaacgtctgtttattataaaatcaagaccgtcgatctgttaggcaaaggtgatatcgatgcagcgtatgaggaaatcaataaaagcatcgagcttgaaatgtcgtggtttaactatgtcctgttggggaaagtttacgaaatgaaaggtgagaatcgtctggccgctgatgcctatctgaccgcctttaatttacgtccaggtgaaaacactctgtactggatcgagaacggcgtatttcagacatccgttcagaaaattgtcccttatctgaatagttttctggcagaagattaaatttaacgctgaaccatgacaaataaaagcgaaaagatattaaatttttcgcttttattttgtgaaaaacatgttgccaaaaatagcttatgttaattttggcaacatattcattgcaaagatatgtaaatataactctttgtaattaaacgatgtttatcctttcatgatattttccatgatatttatatgttaattcaaaaaaatcaatctatcagttttttcatgtttgtgtttatttcactttttctttaggacttatctcaacccattcgttaatcttgtcgacagttgaacgggcacgcagcatatatgaagcataagcccggttcttaaaaatacagctcaggagaaatgaacatgagttctgtcaaaaagatcgggctatttgcctgtactggcgtcgttgccggtaatatgatggggagcgggattgcattattacccgccaaccttgccagtattggtggcattgccatctggggctgggtaatttctattattggggcaatgtcgctggcttatgtttatgcgaggctggcaaccaaaaaccctcaacagggtggccctatcgcttatgctggggaaatatctccggcgtttggtttccagaccggcgttctttattatcacgcaaactggattggtaacttagccatcggtattaccgcggtttcttatctttctacgttcttcccggcattaaataatccaataccggcaggtattgcctgtattgctatcgtctggctgttcacctttattaatatgctgggtggggcctgggtcagccgcttgacaacgattggcctattcctggtgctgatcccggtagtcttgaccgcagtcgccggctggcattggttcgatatcgcgacctatcacgcgaactggaacacgtccacgacgaccgactctcacgccattgttaaaagtattctgctctgcctgtgggcgttcgttggcgttgagtctgccgccgtcagcaccggcatggtgaaaaacccgaaacgcaccgtaccgctggcaaccatgctgggtaccgcgctggcaggcatcatctatatcgctgcgactcaggttatcgccgggatgttcccagcttccgttatggcctcttccggcgcgccgttcgctatcagtacctccacgattctgggtggctgggctgcgccgctggtttccgcctttaccgctttcgcctgcctgacgtctctgggctcctggatgatgctggtcggccaggctggggttcgcgccgccaacgacggcaacttcccgaaaatttacggtgaaatggataaaaacggtattccgaaaaaaggtctgctgttggctgcggtgaaaatgacggcgctgatgattctgatcaccatcatgaactccagcggcggtaaagcgtccgacctgttcggcgaactgaccgggattgccgtactgcttaccatgctgccgtacttctactcctgtgttgacctgattcgcttcgaagggttcaacatccgtaactcggtaagcctgatttgttctgtactgggctgcgcattttgcttcatcgcactgatgggcgccagctccttcgaactctccggcacctttatcgtcagtctgatcatcctgatgttctacggtcgcaaaatgcaccagcgccagaacaacgacagcgacaacaatacggctgaagcgctttaaccgctaactcctttttctcaaagcccctttcgtcacctgctatagcgtagcgggaggggcccactttaccaggaacaagactatgaacgttattgctatcatgaaccacatgggcgtctactttaaagaagagcctattcgtgaactgcatcgtgcactggaaggtttaaatttccgtatcgtctatccaaacgaccgagaagacctgctgaagctgattgaaaataactcccgcctttgcggcgtcattttcgactgggataaatataaccttgagctttgcgaagagattagcaagctgaacgagtatatgccgctgtacgccttcgccaacagctactctacgctggacgtcagcctcaacgatctgagaatgcaggttcgcttctttgaatatgctttaggcgccgcagccgatatcgcggcgaaaattcgccagaataccgatgaatacatcgacaatattctgccgccgctgacaaaagcgctgttcaaatatgtgcgcgaagggaaatatactttctgtacgcctggccacatgggcgggaccgctttccagaaaagccccgtcggcagcatcttttatgatttcttcggcccgaacacgatgaaatccgatatttcgatttccgtttctgaactgggttcgctgctggaccactccggcccgcataaagaagcggaagagtatatcgcccgcgtctttaacgccgaacgtagctacatggtgacgaacggcacctctacggcgaacaaaatcgtcggtatgtactccgcgccggcaggcagcacggtactgattgaccgtaactgccataaatcgctgacccatctgatgatgatgagcgacattacgccgatttatttccgcccaacccgtaacgcctacggtattcttggcggtattccgcaaagcgagttccagcacgccactatcgctaaacgggtaaaagagacgcctaacgcaacctggccggtccatgctgttattactaactcaacctatgacggtctgttgtataacactgactacatcaagaaaactctggatgtgaagtccattcattttgactccgcctgggtgccttataccaatttctcccctatttatcagggtaaatgcggtatgagcggcgaccgtgtggaaggcaaaatcatttatgaaacccagtccacgcataaactgctggcggcgttttcacaggcatccatgattcatgttaaaggcgacattaacgaagaaacctttaacgaagcctacatgatgcataccaccacttctccgcactacggtatcgtagcgtctactgaaaccgcagcggcgatgatgaaaggtaatgcgggtaaacgcctgattaacggctctattgaacgtgcgattaaattccgtaaagaaattaaacgcctgaaaagcgaatctgacggctggttctttgacgtatggcagccggaacatatcgatggagctgagtgctggccgctgcgttcagatagcgcatggcatggcttcaaaaatatcgataacgaacacatgtacctcgacccgatcaaagtcactatcctgacgccggggatgaagaaagacggtacgatggatgagttcggtattccggcaagtctggtcgccaaatatctcgatgaacgcggcatcatcgtagaaaaaaccggtccatacaacctgctgttcctgttcagcattggtatcgacaaaaccaaagctctgagcctgctgcgcgcgctcactgaatttaaacgcgcctttgacctgaacctgcgcgtcaaaaacattctgccggcactgtaccgcgaagcgcctgagttttatgaaaatatgcgcatccaggaactggcgcagaatattcataaactggtcgaacatcataatctgccggacttaatgtaccgtgcgtttgaagtgctgccgaaaatggtgatgacgccgtatactgcgttccagaaagagctgcatggcgaaacggaagaggtgtatcttgaagagatggttggacgcgtcaacgccaacatgatccttccttaccctccgggagtgccgctggtgatgcctggtgaaatgatcaccgaggaaagccgtccggtactggaattcctgcaaatgctgtgcgaaatcggcgcccactatccgggcttcgaaaccgatatccacggcgcctatcgtcaggcagacggacgttacaccgttaaggtgctgaaagaaaatacgaaataagtaccaaagggaagtggcttgccacttcccttttttcacgcagcaaggagactttatgaaaacaccctcacaaccgcgcgcgattttttacatcgtggcgattcaaatttgggaatacttcagcttttacggcatgcgtgccttactcatcctttatcttacccaccagcttggttttaatgacagccacgcgatcaacctcttcagcgcctacgcctctttagtttacgttacccctattcttggcggctggcttgccgaccgcctgcttggcaaccgcgtggcggttatcaccggcgccctgttgatgacgctgggtcatgtggtattgggcttagaatctgattcaacgttgagtttatatgcggcgctggccattattatctgcggctacggcttgtttaaatccaatattagctgtctgctgggcgaactttacgcccctgatgacaaccgccgcgacgggggattctcgctgctctacgccgccgggaatattggatcgatagccgcgccgatcgcctgtggtctggcggcgcagtggtatggctggcatgtcggctttgcgctggcgggcgtgggaatgttcatcggcctgctcatctttttaagcggtcatcgccactttcagcagacgcgcggtgttaatcgccccgcgctgcgggcggttaaattcgcccttccaacctggggttggctggtattaatgctgtgtatcgcaccggtattcttcaccctcctgctggaaaataactggtctggctatgtgctggccattgtctgcgtcttcgcggcgcaacttatcgcccgtattatggttaaatttcccgaacaccgtcgcgccttgtggcaaatcgttctgttaatgatcaccggcactctcttctgggttctggcgcagcagggcggaagttcgatcagtttattcatcgaccgttttgtcaaccgccactggctaaacatgaccgtccccaccgcattgttccagtcggtcaatgcgattgcggtgatggcggcgggcgtggtgctggcgtggctgagcagcccgaaagagagcgcccgctcggtgctgcgcgtctggcttaaatttgccgtggggctggtattgatgggcggcggttttatgctgctggcgctaaacgcgcatcaggcccggttagacgggcaggcatcaatgggaatgatgatcgcagggctggcgctgatgggctttgcggaactgtttattgatccggtcgcgatggcgcaaattacccgcctcaacctgcctggcgtcacgggcgtactgaccggtatttatatgctggcgaccggcgcggtcgctaactggctggctggcgtggtcgcgcaacaaaccacggaatcgcaaattagtgatacggcggtagccgcctacggacactttttctcgcaaatgggcgagtggacgctaagttgcgtggcgctgatcgtcgccattgtcggcctgagatgggtttgcacccggactacatcggcgctaccgcagggcgattaaacggtggttcgctgcccacaaggaggagacgggcagcgaatcggcacatcagatagccgcgtcgtcttcttcgccagtacggatacgaataacgcgggcgacatcaaagacaaagatcttaccgtcgccgattttccccgtctgcgcggtacgaatgatggtatcaacacaggtatccacgatgtcgtcaggcacaacgatttcaatttttaccttcggcagaaaatccaccatatattccgcgccgcgatacagctcggtgtggcctttttgacggccaaaacctttgacttcagtgaccgtcatgccggtaatacctacctcggccagcgcttcacggacatcgtccagcttgaagggtttaataatcgcatcaatctttttcatgctattccttgaaaaggtcgcctgtgttttgatcggttaaacgtaacatatttcgcgctactttacggcatgaaaactactctttgaaatcattcgcatccagttcgtgacgggagagtagcttatagaattccgtgcggttgcgccccgccatccttgccgcgtgcgtcacgttacctttggtaatttgcagtaacttgcgcagatagttcagttcaaattggtttcgcgcttcggcaaaagttggcagcgcggtgttttcgccttccagcgcctgctcgaccaacgcatcgctgatcaccggcgaagaagttaacgccacgcattgttcaatgacgttgaccagttggcgcacgttgcccggccagcttgccgtcatcagccgtttcattgcatcagtagaaaaggcgcgaacaaacggtttatgccgctgtgccgactgtctgagcagatgattagccagcagcggaatatcctcggtacgctccgccagcgccggaattttcaggctcacgacattcagccggtagtacaaatcttcacgaaattcgccccgcgccatcgccttcggcagatcgcggtgcgtcgcggaaataattcgcacgtcgatatcaatatcgcgattgctgcccagcggcctgactttgcgctcctgtaacacccgcagcagcttcacctgtaacggcgcgggcatatcgccaatttcatccagaaacagcgtgccgccttccgccgcctggaacaacccttcacgattgctcactgcgccggtaaaggcgccgcgcgcatggccgaataattcggactccagcaactgttccggtaacgcgccgcagttaatggcgacaaacggcttgttactgcgcgggctggcattatgaatcgcctgtgcgaaaatctctttcccggtgccgctttgtccgttaatcaatacgctgacatccgactgcgcgaccatgcgcgcctgttcaagcagtcgcagcatcagcgggctacgggtaacgatagcgttgcgccagctatcgtccgtcgcgggagcggactgctccagcgcttcatctatcgctttatataacgcgtctctgtcgatcggcttcgtcaaaaagctgaatacgcctttctgggtagcggccaccgcatccggaatagaaccatgcgccgtcagaatgataaccggcattcccggctgtactttctgaatttctgtgaacagttgcataccatccatttcgtccatgcgcaggtcgcttattaccagatccactttttcccgatgtagtacccgtagtccttcctggccgctctctgcggtcacgacgctgtatccttcactggtcaggcgcataccgagcaatttcagtaatccgggatcgtcatcgaccagcagcaggtgcgccggtttacggcttatcatggcgttacctcatcttgtgacggcgacggcgccgcgccatcttcagacgtcgcgggtttgtcattcgtatgcggcgtatcggcgttgtaattccctgccggttttcgtgtcgaaagctggcgctcaatatcggttaaactctccagcttacgggtggtaagatcgagctgcgtttgcaaggcctgttgctgctggcgcagcgcatccagctcactatctgacatttgctggagtttgctataacgctgacgttcggcagaaagcgccagttgcagcgcctgaccgtcatgccagatttggtagacgggccgtacctgagccggtatttgcgcgcttaacgcctccagacgggtcactatggcgcgccgctccggcggcgtaatttttgcatccgccagtaaaatcccgcgcctgaaggcattttgccagttatcatccgtcaacgcgcgcgcctctgcgcgcgactgaaccggcatcagacgatcggcgcagtcaatcgtgcgtagccagtacagcggattcgtctccaccgcctgcccgcgtagcgaccagatatccgcgcacgccgtcgggagataatccgccagttgataatgggggagcgtgtcctgcgctgcgctaccgggcagttgctgtgaagcatggggaacacatgcggtcagcgccagacacgatatgcccaccggtattccccaccgcaaaaggcatcgtttaatagtttggacgaaaacgtgtgacatacgcaccaggcttaaattcatattagtgtttgtcagatgcaggcaatggcagcgagatgcgaaaacaaacttcctgcgcgttgtcatccaccagttggatctctccctgcattcgacgaatacaatctctggcgatactcagccctaacccactgccttttaccgccccttttcgctggtggcttccctggaaaaaaggctcaaaaatcatttctctttcggtttgcggaatcggctcgccgctattaaccacatcgatataaaccgtggagccctgagagcgactacggatacaaatgttaccggattcagcgccatagtgcaccgcgttggaatagagattatccagcacgctcatcagcaacatgggctctgctatgcagcgttcggcctccaggtcgacatcggtatgcatcattttagcgcgggcaggcaaactgtgggcggaaaccaccatatccacaagcggcgcgatatcgaccgcttccagctctgtggcactgtctaccagtttccggttgtaatcaagcaattgctcaatcaatttttgtaaattacgactgctgtcatccagaatatcgaccacctctttttgctccggcgtcagcggcccaaccacctgatcggccagcagctcagtcccctcgcgcatactggccagcggggttttcagctcatgggacaggtgacgtagaaactgatggcgctgggattccagccacgccagacgctcactcagccagataatgcgctgccccaccgatcgtaattcacgcggaccggtaaaggtgacggtattccccaaagaacggccttcgcccaggcgattaatcatccgttcaattcctttcaccggcccgataatcatgcgggtaaaaagtagcaccatcgccaggctcaccagaaatagcaccagcgcctgccagccgaaaaattgtccgcgctcggcgatttcttgttgtaactgctgcccgcgcgagtaaaccacggtacgcgtcgcctgcaccatttccgtattcgcgttggcaaaggcctccaggcgcgcggccgctgccgcttccgggccgctatctttacactgcaattgcgccagcgcgtttaaatcctggcgtaacgcctgatacaacttatcatccggcaagacgccggcatgggcgtccagcatatcgctatagcgcttacgctggctttgatacacttttgccagcgtcggatcgtcaagcacgcaatactgtcggtagcttcgctccatctccagcgcgacgttggtcatcgcctcgctgcgccgggcgtcaataagcgtgctgcggttagtcaccgcagcctgatcgcttaacgcgttaaggctttgccacgcctgccaggccagaaccagcaacggcagcaggatcagcaaaaaggccagcatgaccaattgtcgtaaagaacgggggaaaacagaccagcgcttcaacgtgtcgctcacataaaagaagaataaaaaagatgctaaccgagggaagcgccagatacaacaaagccgggctaaacccggctttgttatggaataaggcggtgcctaactcgacgtttcgcccggaggttgataaagctacgctgttatcagaagttggacggcaggcaccttgttgtgcgtcattcgaagtttatgtagcgcgtccctaaggggctgacataagaaggtgaatgagccactggttaccattatgcagtaattgtgccaacattcaaaagaatttgttaacataatgatagatatgaaaaatatcgttattcatgctaaaaatggctctgtctgttttttgccctttctgtcgccaatcagcaacacctgcaacacctaaaaataaaacaatttaaaatcaaatagttaaatgtctctttttggcgacaacctatcccccactcatgtcgggatttcccgacactttaatcttgcggcataagcgctagtttattgccggatggcggcgtaaacgccttatccggcctaccgcttgacgttcaagacggtagctacaaccgcgcttccccgtgggcctgataagcgccgtctacaaaaaagcccctcgtgaagaggggcttaatggctatcgggctaattaaccaagctgcttacgcgcattacggaagatacgcatccacgggctatcctcgccccagttttccgggtgccaggagttggcgacggtgcggaatacgcgttccggatgcggcatcataatcgtcacccgaccgttttcggtcgtcaccgccgtgatgccgttcggcgaaccgttcgggttagccggataggtttcggtcaccttaccaaagttatcaacgtagcgcagagcgaccaggcctttgctctcaagcgcggcaagatgcgcatcgtcacgcacctcaacgcgcccttccccatgggaaaccgcaatcggcatctgtgagcctaccattccttgcagcagcagcgatgggctttgcgtcacttctaccaggctgaagcgggcttcgaagcggtcagaatggttacgtacaaaacgcggccacagttcgctgcccgggatcagctcgcgcagattcgacatcatctggcaaccgttgcacacgcccagcgccagcgtctgcggacgatggaagaaggtttcgaattcgtcgcgcacccgatggttaaacagaatggatttcgcccagccttcgcccgcccccagcacgtcgccgtaggaaaagccgccgcaagccaccagcgcatggaagttacccagaccgatacgaccgcccagcaggtcgctcatatggacgtcaatcgcgtcaaagcccgcacgatggaacgccgccgccatctccacgtgagagttcaccccctgctcgcgcagtacagcgactttcggtcgtgcgcctgtcgcaatgtacggcgcggcgatatcttcattaatatcaaacgacagcttcacgttgaggcccggatcggtatcattcgctttcgcctcgtgttcctggtcggcacattgcggattgtcgcgcagacgctgcatctgccaggtggtttccgcccaccagacacgcagtgtagtgcggctttcgctgaataccgtctggtcattagcggtaatcacaaagcgatcgccagccagggcctgaccaaggtagtggacgcagtcagcaaggccgtactgcgccaatagcgcttcgaccgcgtctctgtcttcagcgcgtacctgaatcacgccgcccagctcctcgttgaacagtgcggccagatggtcatcgcccagcgcggcaatatcgacctgcacgccgcagtggccggcaaaggccatctcggccagcgtcaccagcagaccgccgtcggaacggtcgtgccaggccagtaatttacgcgcagcgaccagcgcctgcatggcgtcatagaagcctttcagttgcgcgacgtcacgcacgtccgcgggtttgtcgccaagctgacgatagacctgcgccaacgccgttgcgcccagcgcgttgtggcccttgccgagatcgatcagcagcaaggcgttatcttccgttgaaagctgcggcgtaagggtgtgacgcacgtcttccacgcgggcaaacgcggaaatcaccagcgacagcggcgaggtcatttcgcgctgttcgttgccttcctgccagcgggttttcatcgacatcgaatctttgcccaccggaatagtcaggccaagctgcggacagagttcctctcccaccgctttaaccgcgtcatataaaccggcatcttcgccaggatgaccggctgccgccatccagttagcggaaagcttaatgcgcttgatatcgccaatctgcgtcgcggcaatgttagtcaacgcttcaccgacggccagacgggcggaggcggcaaagtccagcagcgccaccggcgcgcgctcgccaatcgacatcgcttcgccgtagtagctgtcgaggctggcggtagtgaccgcgcagtcagccaccgggacctgccacgggccaaccatctggtcacgcgccaccataccggtgacggtacggtcgccaatagtgacaaggaaggttttttccgccacggtcggcagatgcagaacacgctttaccgcgtcggcaatcgtgatatccgcgcggttcagcgcatcgcctttcgccttcaatgtttgcacatcgcgggtcattttcggcgttttgcccagcaggacatccagcggcaggtcgatcggctgattgtcgaaatggttatcatgcaacgagagatgctgttcttcggtagcgtcgccaatgaccgcatacggcgcgcgttcgcgcttacacagttcatcgaacagcggcaactggtcagccgcgaccgccagcacatagcgctcctgggattcgttacaccagatttccagcgggctcatgcccggctcgtcgctaagaatgtcgcgcagttcgaatttcccgccgcgcccgccgtcgctcaccagctccggcatggcgttggagagaccgcccgcgcccacatcatggataaacaagattgggttagcgtcgcccaactgccagcagcggtcgatcacttcctggcagcggcgttccatttccgggttgtcgcgctgaacagaggcaaaatcgagatccgcatcagactggccggaagccattgacgatgccgcgccgccgccgaggccgatattcatcgccgggccgccaaggacgatcagcttcgcgcccacgacgatctcgcctttctgcacgtgatcggcgcgaatattaccgatcccgcccgccagcatgatcggcttatggtagccgcgcagctcttcgccgttgtggctgttcactttctcttcataagtacggaagtaaccggtcagcgccgggcgaccaaattcgttgttaaacgccgcgccgcccagcggaccttcggtcatgatatccagcgcggtgacaatacgttccggcttgccaaaatcctcttcccacggctgttcaaagcccggaatacgcaggttggaaacggagaagcccaccagcccggcttttggtttcgcgccacgcccggtggcgccttcatcacgaatttcgccgccggaaccggtcgccgcccccggccacggagagatggcggttgggtggttatgcgtttcgaccttcatcagaatgtgcgcgggctcctgatgaaaatcgtaacggccggtattgtggtcggcgaagtagcgccccaccgcagatccttccatcaccgcggcattgtctttataggcagagagcacatagtccggcgtggtttcgaaggtgtttttaatcattttaaacagcgacttcggctgcggtttaccgtcgataatccagtcggcgttaaaaatcttgtggcggcagtgctcggagttcgcctgggcgaacatgtacagttcgatatcgttcgggttgcgccccagtttggtaaacgcctcctgcaaatagtcgatttcatcttccgccagcgccagaccaagacgcaggttggcgtcaattaacgcctgacggccttctcccagcagatcgacactggaaaccggcgcaggctgatggtggataaacagtttttccgcatcggttaaagaagagaacaccgtctccatcatacggtcgtgcagctctgcggccacttgtcgccactgttccgccgtcaacgtcgaagcctcgatatagtacgctacgccgcgctccagacgatcaacctgttgcaggccgcagttgtgggcgatatccgttgcttttgaagaccagggggagatggtaccaggacgcggtgtgaccaacaggagtttacccgccggcgtatggctgctaagcgccgggccgtattgcagcagacgggtaagctgcgcctgctcgctatcatttaacggggcgttcaggtcagcaaaatggacatactcagcgtatatattgtggacctggaggttggcagcctgaaagcgcgccagcagtttattgatacggaatgcagacagtgcaggcgaaccacgcagaatttccatcataagtctctcgtcttctaagctttggtgtgcgcaaggggggaaacggccgtcattataaagaatctgacgcgccgacgaaaccgtttgcgtagaaataaaatcaccgctttttcttgtcatacggtgcggctatcgttgcgaataagttgccaactggcgcattgttacgcaaaatgccgctcattaatgacttatctattgcagcaaaacatctttttcagcccgaggcaacgcacgatccagagaattaactaattgaaaaaattaaagattaattatctgttcatcggcatattgacgctgctgctggcagcagccctttggccctcaatcccctggttcggtaaaaccgaaaaccatatcgccgcgattcaagcccggggggtactgcgcgtcagtacgatcgactcgccattaacctattccgttatcaacggtaaaaaatatggtctggactatgaactggcgcagcagttcgccaactatctcggcgtgaagctgaaagtgacggtgcgccagaatatcagccagttgtttgacgatctggataacggcaatgccgacctgctcgcggctgggctggtctacgacagcgcacgcgttaaaaactatcagcccggccccatgtattattcagtttcgcaacagctcgtctaccgggtcggacaatatcgcccacgttcgctggcgaccgttaacgagaatcagcttaccattgcgccagggcacgtcgtggtcaatgatttacagcgtttaaaagagacaaagtttcccgacctgagctggaaagtggatgataaaaaaggctcgacgacgctgctggaagaggtcatcagcggcaaactggattacaccattgccgattcagtggcgatcagtctgtttcagcgcgttcatcccgagctggccgtggcgctggatgtcacggatgaacagcccgtgacctggtttagccgactggacgacgataatacgctctccgccgcgctgctcgattttttcaattcgatcaatgaagacggttctctggcgcggatcgaagagaaatatctgggacatggcgatgatttcgactacgttgatacccgctctttcctgcgagcggtagataacgtcctgccggagctggaaccgttatttaaaaaatatgccaaagagatagactggcgcctgctggcggcgatttcttatcaggaatcacactgggacccgctggcgacctcgccaaccggcgtgcgcggcctgatgatgctgactaaaaataccgcccaaagtctggggctgaccgaccgtaccgatgcggagcaaagcatcagcggcggcgctcgctatcttgaagatatgatggctaaagttcccgaaaccgttccggaagacgagcgtatctggtttgctttagccgcctacaatatgggttatgcgcacatgctcgatgccagatcgttgacggtaaaaaccaaaggcaatccggatagctggaccgatgtgaagcagcgtttgcctctgttaagccaaaaaccgtattacagtaagctaacctacggttacgcgcgtggacatgaggcttatgcttatgtggaaaatatccgtaaataccagataagtttggtggggtatttgcaggaaaaagaaaagcaggaagcggaagctatgaaactggcgcaggattacccggcggtgtcgccggaggagctgaataaagcccccttccccttcctgtcgtttttatcgcagtcatcaggctacctgacgcattcgccgtctttactgtttacgccgcagaagaaagaagaaaaatagcgcgatggtcttatcggatggcgacgcgcaacgtcttatccggcattgcgctatactgccggccccgcgccttccgcacggtcggctttcttcagagctttaatttcctgacgacgcatacggaaaaaatcactgagcagcgtcgcacattcatcgcgcaacaccccttcaataatctcgacccggtgattcattcccggatggtgcagcacgtcaattagcgatccggccgcgccagtttttgcatcgcgcgcgccaaagacaacgcgtccaatgcggctatgcaccatagcgcctgcgcacatcacacagggttccagcgtgacatacagcgtggtatccagtaaccgataattctgcaataccagaccgccctgacgcagcgccattatttcagcatgcgcagtaggatcgtggcggccaatgggtcgattccagccttcgccaatgacgcgatggttatgcaccaataccgcgccaaccgggacctcgcgttcgtcccaggcgcgtttcgccagcgtcagcgcgtggcgcatccagtattcgtgatctaattcgacatcagacaaagaggtaactccggtaatgaaagcgggcggcattatacacagacgctatgcgtttcactattcgagctgctgcaactcgccgtgcggcgtcacccgccagcgatgctggcaaaaataaagcagcgggttatcctgtttgctgtcgctgtagccgctataaagacgcagcggcgtaccgattttacgttccagttgcgcgactttttcatggcccagacagcgcacggttaatacccagccgccataccgtcgcgccatctggctggcgatgaggttaacgcgcggcagccacggcgtatcaaaatagacttgctctaccaatgattgcggagaaccggtaataagccagatatccgcgtcagagctcaatagataggtggtcagacgctcctgtacaaccggaaacgccgtgacgttagcgcgaaaccaacggacaaaatccgcctgatgcgcctgcaaacgcgtttcgctatggccaaaagtacagccccacaacaacagactcatcggccagcgggccgcacgcccttttaccagtaaaccgataccgataatgggcaacaacggcagtacgagcagcgcatttagcggctgacggcgcagcaaataacgcagaaaactgccgaacatatcctgttgatgtaacgttccatccaaatcaaaaaagacgacacgacgctcgtggctgaccaaaccttactcctctggatcattgaaccccagcagccaggtaaaaataaacccggcaattaccgctattaaatagcctaacagatagaacaggacttttccggcaacaattgttaatgccagcggcaaaccggaaataccaaaggtaattaccgtcgccactttccagtagctgatcaacgccccgcctaccgcgccgccgaggcaagcgccaataaatggcttacccaatggcagcgtgacgccaaaaatcagcggctcgccaatccccagcagtccgacaggaagcgcgcctttaatcacctttttgagtcgcgcattgcgggttttcatcagtacggcaatggccgcgcctatctgaccaacgcccgccatcgccaggatgggaaacagcgcgttatagccgtgcgcttgcaccagctccacatgaataggcaccagcccctgatgcagcccggtcagtaccaacggcaggaaggttccggctaacaccgcgcccaccagaaaaccgccgcgatcgatagcccaggacgcgccgtgagcgatagcgtctgaaatccagccgccaagcggttgcagagcgacaatcgctaccgcgccggtgataacagtcgtcaataaagggttaagaattaactccagcgaccccggcagcagcttacggaactggcgctcaatccagcacattaacgccaccaccagcaggacggcgataacgccgccccgtcccggctgaagcacctcgccaaagagcgtaatctgcgccagttgcgggctggaaaggatccccgccatcacgccgcctaacgcctgcgatccgccaaagactttcgcggtattgacgccaaccagaatgttcatgatagcgaacaccgcgctaccaaatatccccatcaggcccagcaggttaggataatggacggcaacatcgccgacgatatccggacgtttaagaatgttgataatgccggtaatcaagccggatgcgataaaggcggggataagcggtataaaaacattcgccagcttacgcaacgcatcgctcatcggcgctttatacttcgctttcgcctcggatttggtacgcgccatagcgtcatccggttttacaccacctgcggcaatctgcacgcgcatcgcatcaaccacctgcgcagccttccccggcccaacgatcagctgatgttgctccccttgctttacgtatccactgacgccaggcaacgcttttaagcgcggaatatccagttggctgtcgtcctgtacctccaccctgactcgcgtcatacagttttccaggcgcagaatattttgctctccgccgataccacgtaaaatgtcgctggcgagcgctgccgtcttatccatacacacctctttagtgttctaacgccgcccttaaaaagccctgatgagcggcaagtttttccctggcggctgcagcatccagccccgtaagcgccatcaaaatggcgggcttaacctcaaaatcggtctgtttcagcaacgcttctgcttcttcacgacctatcccggtcgcttcaacgaccatccgacacgcgcgatcgaccagtttgacgttggtggctttcatatccaccatcaggttttgatagaccttgccgaatttcaccatcgcgccggtagaaatcatattgagcaccattttctgcgcggtgccggatttcagccgcgtggagccggtaagcgcttccggcccgacaacgggcgaaatagcgatattagcctcccgcgcaataggcgaatctggattacaggagacggcaacagtggtacaaccggactgtcgcgcatagcgcaggccgccaatcacatagggtgtacgacccgacgccgcgagccccacaaccagatcctgttcttgcagatttagcgcgacaagatcgtcttcgcctgcctgttggctgtcttccgcgccttcgaccgctttcagcaacgcgcccggcccaccggcaatcagcccgacgaccagaccgtgcggaacgccaaacgtcggggggcattcagaggcatccagtacgccaagccgaccactggtgcccgcgcccatatagatgatacgtccgccagacttcagcgccgccgcagcggcatccaccgcacgcgcaacgtcaggcagagtggcttttaccgcttccgctaccagcgtatcctgttcattaaaacgcttaactaattcaggagtaggcaacgcatccagatccatcgtttgcgggttacgggtttcagacactaaggtaccaagattcatttttgtccctctggaatttttaattcataataagcgtccatgatggaatagaatattcccccaggcgagtgaaatttcgttttgtcgtcgccatcacgtttcgcaggagctgcccatgaactgtttgattcgtattcgccagcgttatccggatctcgcgcaaagcgacaggaaactggcggattatctgctcgcgcaaccggatacggcgcggcatctgagctcgcagcaactggcggctgaagcgggcgtcagccaatccagcgtagtcaagttcgcgcaaaaactggggtttaaagggtttccggcgttgaaactggctctcagcgaagcgttggccagcaatcctaatccgcattccgttcccgttcataaccagattcgcggcgacgatccgatgcgcctggtcggggaaaaattaattaaagagaatgtggcggcgatgcacgccacgctggacgttaacagtgaagaaaagctgttagaaagcgtcacgatgctgcgccacgcccgccgtattgtgatcaccgggattggcgcctctgggctggtggcgcaaaattttgcctggaagctactgaagattggcattaacgcggtggttgagcgcgatatgcacgccctgctggcgacggtgcaggcgctggcgccggaggatctgctgctggcgatctcttattccggggaacggcgcgagctgaacctggcggcggacgaaacattacgcgcaggcgcgaagatcctggccattaccggtttttctcccaacgccttgcagcagcgcgccacccgctgtctgtatacgattgctgaagagcaggcgacgcgcagcgccgctatctcctcgacacatgcgcaaatgatgttgaccgacttactgtttatggcgctggtacaacaggatttagagcgggcgccggagcgtattcgccatagcgaggcgctggtaaaaaaactggtttgaaaatggctcttccgcctcatgcagaagagctatcaagtttattgcgcttctttagcgtgaatcaattgcgtcaggagtttgttaaccggtacggcaatattgttctgagcgccgattcgcgcaatcgcaccatttaaatagtcgatttcggtcagtcggcctttatgtaaatcctgatgcatagaaggatagtggtggccgctctcacgcggatcgaacactttcttcaccgtattcatcaccatttgctcagtcaacggaatattctggctggcagcaactaacacaaactcatcaactaccgcttgcgctaaatctaaagcaccaggccgctgaccaaatccgccgacattacaatccagtaacgcgcaataggtgttcattacgctattaaaggctgctttcttccagatcgataataatacgtcagggcttatttcagcattcaatccagcactattaagggtggcaatgaccttagcctcttgagccgaatcctggctggctatcggctgcagttcaatcgttccggtaccggtggccataatatgcccagccccctccagttcgctggaccataacgtcacacccgcatagattttctgccgatcgacatatttctccagggtttcgatatttcccaggccgttagataaaatcatcacgaccttcgcggctggcagcagcggcttaatacgctgtaacatgctatccaactgcatggctttggtaaacagaataaccagctcaaactccccctgggattcatcagccaacatagcagggatggggtaatacttctgagtcgtttccgtttcgacaaacacccccttgctacgaatagcgtcgacatgctcctgccagccatcaataagcgtcacgtcgtgcccggcctccagcagcatatagccaaaacgacatcccatagcgcctgcacctgcgattgcaattttcatttttatttccttattatctgattaatgaattttggctaaaaccgttgcgacatattttttcgttatcagggtcaacacgactccaataagcaatagcaccgttgtcaaaataaatactgtattgtagcttccggtatattttgcaatagcggacgtgacgtaaggagcaataaccgcaccgacggcaaaaccaaaatacataaagccgtagtttagtccctggttacgcataccaaaattctggctggtcaagccagggaagataactaatataccggcataagcaaagcccacgcccagagcgctgaaatagaataccgaagtattaccgttgaagaacaacagcagcagcatacagacgcaggtaaaaagataaacaataaccagcgtattatagccgcctaatttatcggttaaccctccccagaacaggcgaccgatcgagttaaatatcgagaccaggctaacgactaatgcaccggacagtaaaccgtactgcgtcataccaatttgcgcagaacttgagctaattaccatcccagagaacacgcccagcgccagaatcataaacagcagccagaagcgcagatctttcagcatgtgccgatagtctttatccagtggcgaggctttaattcctccgctatcttttgctggcgcgctacgaataaagagctggacgataaaaataaccaccagataaacaatacccagatataacaacgcccgactaacatcatgagtttgcgccataaaatattcggccaggcgggtgcaaagtagcgttccgacgccaacacccgccagtacgataccgctggcaagaccgcgacggtcagggaaaaatttcagaatattattaagattacccgtaaaagccaggcccgatcccaacccggcaatgacgccgtaggttaaaaacagcatgggcaaattatccacaaacccggacaagataaaacctaaagaaaacaggataccgccgataactatcgcctgctttcctttaccattgtcgatcattctcccaccccaaatcatcggtaaaggaatgatccccatgttgatagagaatgctaacgccagcgtagccggatcccagtgatattgcgccatgagtggtgttttgaaatagctaaatgcgtagacgcccccgagcacaaaattgatgcacacgtgagcggcaagcattccccagcggttgattgatgccgacataattttccctttttaaaatgcactgatcacagtttaaaaaaaagcaaaataggcaaacaatttggtattttttataatcgttataacaaaacccaatcgattggcattaaattttaatgaatatcaaacaactacattccttcctgatattgtgtgatgaattacattatggtcgggcagccagtcgcctgtttatcactcagccatcattaagtcagcaaatcaaacaacttgagtcatcacttaaaacaatattatttaagcgaaaaggtagaggaattaaattaacaaaagcaggcattattttgcaacgacacgctaacaaaataatgctggatttaaaaaatgccgaaaatgaacttcttccctatcaggatcaacagcgcgatactatttcaatcggggtgtcaggcagctacctggtcctgcccgcttttcgcaactttatggcgcaccatccggaaatatctttaaatgttaaagagttctcaactgagcaaaccattaaaaagctgacggatagcgccgttgatattggcattgtttatcgaacagcgctccctgcccagctaagctcgaccatgctgtttgaagatgaaattatcgctgcaatcccactttctcatcctctggcgacacgcgaacgtctgcatctaaaagatttaaacgaccagcccattatcgtgcttaatgactctctgctattaagagggatcatcaccacagaatttaataaccgcaaagtcgttcctaacgtcatctgcgaactggataaccactactcatgccttgagtatgccgaagcgcagattggcatcgcatttattacccgctcgctaacccatttatcgacacccaaaaatgttcgcctggtttcactgggcatccccgcattctttattcctgtcatgctggtgcacagtaatgacctttcactggataacgcaaccatctgcctgctcaagcagatcaaaaatttttacactgtagataacaaatcagcgccagaaaagagctggcccgagcagaaaataggcgtataatgcccgcccgatttgtgttgtttctgagaatttcctgatggcgctgttaatcaccaaaaaatgtatcaactgcgatatgtgcgagccggagtgcccgaatgaggcgatttcaatgggcgacagcatttatgaaattaacagcgacaaatgcaccgagtgtgtaggccattacgaaacgccgacctgtcagaaagtctgcccaatccccaatacgattttgcaggatcccgcccatgtcgaaagcgaagaacagttgtgggataagtttgttctgatgcatcacgcagataaactgtaagcgggttaacgtatttccaacgcaacagtgtctgatggcgctatgcttatcaggccgacaatatatcggcctgtaggtcagataacgtgtttacgccgccatccggcaaatctaactttccagaatgaccgtagcgcaggcgtaatggcgttcatcggccaacgtgacatgcatgtgcgccacaccgagtttttccgccagcgttaacgcctcgccccacagccgcaaacgtggttttcccagctcatcgttaaacacttcgaactgattgaacgccagaccgttgcggatgccggtgccaaaagctttcgctgccgcctctttgaccgcaaaacgcttggcgagaaaacgcaccggctgctgatgcgtctcccagatagcccactcgttgtcactgagcacacgccttgccagacgttcgccggaacgggagatcactgcttcaatgcgggcaatctctacaatatccgttcccaggccgagaatcgccattagccgcgcgcttccagcatcaaacgtttcatttcagccaccgcctctttcagccccgtcatcactgcccgaccaataatggcatgaccgatattgagctcgtgcatttccggcagtgcggcaatagctttgacgttatggtaggtcagaccatgacccgcatttacttttagccccagacgggccgccagggtcgcggcgctggcaatacgcgccagctcttttgcctgttccgcatcggtttctgcgttggcgtagcagccggtatggatttcgataaacggcgcgccgacttccgccgccgcgttgatttgcgtttcatcggcatcgataaagagcgaaacctggatgccagccgccgccaggcgcgcacaggcatcacgcattttatcgcgctgtccggccacatccagaccgccttcggtggtgacttcctggcgtttttccggcaccagacaacagaaatgcggcctggtttctacggcgatcgccagcatctcttcggtcaccgccatctccagattcatacgcgtatgcagcgtctgacgcagaatgcgcacatcgcgatcggtaatgtggcgacgatcttcgcgcaggtgtacggtaatgccgtccgcgcctgcctgttcagcaataaacgccgcctgtaccggatccggatagtcggtgccgcgcgcattacgtaacgtggcaatgtggtcaatattgacgcctaacagtaattcagccatgacaatcctcgttaatctttcttcgtttttactgtgcgtttgggcataaattgccggaacagctcccggctttttaacggttttcccccaagatacggctttaatgccatacgggtaaagcgtttagcggcacgcagggtatctacatccggaaattcccgcgcctccagcgctttcaggtgccgtccggtaaaggtgttgttatcgatgacgacgctggcgaaaaagcctttttcttcgcggtaacggtaggtcatggtgtcatccacccgttcgccgctgcctgcacagtgggtgaaattgacgccataccccagatgacccagcaacgccagttcgaaacgtcgcaacgccggttcaggcgagccggtggttcccgccagcgcctgaatacagttcagataatcaaaaaagagttcggagaagcgcgtttcatattccagtacgcgagagaggagttcgttgatatacaggccgctatagagcgtaataccgcttaacggcagcgccagagaaactgcctcggcgctgcgcagggttttcacctcgccgcgtccgctgtagcgtaacaataacggtgtaaaaggctgtaacgcgcctttcaaattggaacgtttagatcgcgcgcctttggcgacaaggcgcactcgccccgattcttccgtgaagacgtccagcatcaggctggtttcgctccaggggcgactgtgcaggacaaatgcgcgctgccacccttccacgctgtgttaactcacagatcgtctacgtaaccgagactgcgcagagcgcgttcgtcatcggcccagccggatttcactttcacccacagttccaggtgtaccggcgcttcaaacatctcctgcatgtctttacgcgcttcaataccaatggttttgattttggcgcctttgttgccaatcaccatcttcttctgcccttcgcgctcgacgaggatcagcccgttgatatcatagccgccgcgttcgttggtaacaaaacgttcaatctcaacggtaacggaatacggcagctcggcgccgagaaaacgcatcagcttttcacggatgatttcagacgccataaagcgctgagagcgatcggtgatgtaatcttccgggaagtggtgaatcgcttccggtaaatgtttacgcacgataccggcaatggtatcgacgttcatacccgtttcagcagagatcggtacgatatcaagaaagttcatctggcttgccaggaactggaggtgcggcagcaaatcgactttttcctgcacgttatccaccttgttaacggcgagaataaccggtgctttgccatcgcgcagtttgttcaggaccatttcgtcgtccggcgtccaacgggtgccttccacaacgaaaatcaccagctcaacgtcgccaatcgaactgctcgccgccttattcatcaaacggttaatggcgcgcttttcttccatatgcagacccggggtatcgacatagattgcctgatacgggccttcggtatgaataccgacaatgcggtggcgcgtggtctgcgctttacgggaagtgatcgaaatcttctgcccaagcagtttgttcagcaaggtggatttgccaacgttcggacgtccgacgatggcaataaatccgcagtaagttttgtcagtgctcattccaactccagttttttcagcgcctgttcggcggcagcctgctccgccttacgacggctggaacccgtgccaaccaccggttcgctcaggccgctgacctggcagtggatagtaaattcctgatcgtgcgcctcgccgcgtacctgcacaaccaggtaagatggcagcggcagatggcgaccctgcaaatactcctgcaagcgcgttttcggatctttttgtttatcgcccggacttatctcatccagacgggttttataccagttaaggattaactgctcgacggtctggatattactatcgagaaatactccgccgattaacgcttcaacggtgtccgccagaatggactcccgacggaatccgccgctttttaattcgcccggccctaaacgcaggcactcgcctaaatcaaattcacgggctaattccgccagcgtattaccacgtaccaacgtggcgcgcatacggctcatatctccctcatccacccgtggaaaacggtgataaagcgcgttagcgataacgaagctcaggattgaatcgcctaaaaattccaggcgttcgttatgtttactgctggcgctgcggtgagttaatgcctgctgcaacagctcctgatgattaaaagtgtagcccagcttccgttgaagccgattaattacgatggggttcatgcgataccaataaatgaatgcgtcaacaatccagcacacgaaacagacctgatacacgtcatctgtcctgccgcatcgctgcagcggaaagaaggttgtctataaccaacgctgtttcgtgtgccgtggcgaccaaacggcgccaacctaaaacttcgggggaatattctatacacaacgacaggggatgtcgttagtcttagggaatttatccaggaaataattcacgctgccgctaaaaagacggcagcgtgaacgatcatttcatcacagttagtgaataccgccgatacgactcaggcgtacgcctgtcggccactccccttcctgcttgtcaaagctcatccagatagcgaccgctttaccgaccagattcgcttccggaacaaatccccagtaacggctatccgcgctgttatcgcggttgtcgcccatcatgaaatattgtcccggcggtacaacccaggtcgccagcggttgtcctggctgttggtaatacatgcccaactgatcctgagctatcggcaccatcaggatgcggtgcgtcacatcgcccaacgtctctttacgttcggtcaggcgaatgccgttttctttcgtctcgtttagcggaacttcaaagaaaccgctggtcgcttctccgccgttacggcgggcaaaagtctgtacaaaatcgctcggctcaacgttagagtaggtaaccggcagcgcattttcgcacgcctgaccggagctacagccaggctgaatcgtcacctctttcgcaaccggatcataagtgattttatcgcccggcaaaccgacggcgcgtttgatgtaatctaacttaggatcttccggatatttaaataccacaatatccccgcgctttggatgaccggtctcaatcagggttttctggtagatcggatctttaatgccgtaggcaaatttttccaccagaataaaatcgccgataagcagtgtcggcatcattgagcctgacgggatctgaaagggttcataaagaaatgaacgaacgatcagaacgatcgccagaaccgggaaaaccgacgccccagtctccagccagcccggcttaggcgccactttattgagcgtagcgttatccagcgcatctcccgacgccgtttgcgcggcagcctggcgcgcccgacgttttggcgcgaaaacaaacttatcaacgcaccataaaatgcccgtcaccagtgtggctatcaccagaatcagggcaaacatgttcgccatgccaactccttagggattatttattgtctttaccgacatgcagaatggcgaggaacgcttcctgaggcagctcgacgttaccgatctgcttcatgcgtttcttaccttctttctgtttctgcagcagttttttcttacgactgatatcgccgccgtagcacttcgccagcacgtttttacgtaactgttttaccgtcgaacgggcaataatatgcgtaccaatcgccgcctgaatcgcgatatcaaactgctggcgtgggatcaaatctttcatcttctccaccagctcgcgaccacggctttgcgagttatcacggtgcgtgatcagcgccagcgcatcgacacgctcgttgttgattaacacatcaacacgcaccatatcggaagcctggaagcgcttgaagttataatccagagacgcatagccgcgcgacgttgatttcagacggtcaaagaagtcgagcaccacttccgccatcgggatttcataggtcaacgcgacctggttaccgtgatacaccatgttagtttgtacgccgcgtttctcaatacacagcgtaataacgttacctaaataggcttgtggtaacagcatatgacattcggcgataggctcgcgcagttcataaatgttattcaacggcggcagcttggaggggctatcaacatagatagtctctttcgccgttgtttctacttcatacaccacggtcggcgcagtggtgatcagatccagatcgtattcgcgttccagacgctcctgaatgatctccatgtgcaacaggccgaggaagccgcagcggaaaccaaagcccagcgccgaggagctttccggttcataaaacagtgaggcatcgttcaggctcagcttgccgagcgcgtcgcggaaactttcataatcgtcggagctgaccgggaacagacctgcatagacctgcggtttcaccttcttaaagcccggcaacgctttttccgctgggttacgcgctgaggttaaggtatcgccaaccggcgcgccgaggatatctttaatggcgcagaccagccagcctacttcgccgcacttcagctcggtacgatcaacctgttttggcgtgaagatccccaggcggtcagcgttgtaggtctgcccggtgctcatcactttaattttgtcgcctttacgcatggtgccgtttttaatacgcaccagcgataccacgcccaggtagttatcgaaccaggagtcaataatcagcgcctgcagcgggccgtccggatcgccttgcggcggcgggatatcgcgcaccaggcgttccagaacatccgtcacgccgacacccgttttggcggagcagcgtaccgcgtccgtcgcatcgataccgacaatgtcttcgatttcttccgccacacgctccggatcggcggccggcaggtcaatcttgttaagcaccggcaccacttcaagatccatttccatcgcggtgtagcagttcgccaacgtttgcgcttctacgccctggccggcatccaccaccagcagcgcgccctcgcaggcggctaacgaacgggaaacttcataggaaaagtcaacgtgtcccggcgtgtcgataaagttcagttgataagtttcaccatcagacgctttaaaatccagcgtcacactctgggctttaatagtaataccgcgctcacgctcaagatccatcgaatcaagtacctgagcttccatttcacggtcagacaggccaccgcagatttggataatacggtcagacagcgtcgatttaccgtggtcaatgtgagcaatgatggagaaatttcttatgttcttcataaatatgaatttttcaactcgctatgctgataaatttttcttgatggacacagcggtggacattccacaataactaccccatcaacgactggcgtgcatattacactgtagctttgaaatcgtcagcatacgatctgctgatcaacatacgatgttacatcacaatagaggtctatacgatctataaacctataaacacggttacagtcagtcctgactaaacagcagccggcctaccgcagtcacgttcttgcagacaacgtgactgcggtaatccatcccaccggattgtcttcaaattctccatgttgctgaatcggctaacagcttcttaaacgatcggtattaggctaggttctaaatcttgcctgaatgaaaataaatgtaataatgatagcttggtattgacatatagattgaaaaagcgcatgaaaataggattccaaccagccatattgcaatatgcatatacaagtaacgaggcgacatcaaaccttgagttattaaataaatggagaatagaatccccagatattgagaaggaggagcgtaatagtatttacgacaaaataatagaagcaaatcataccgggagcttatcaattactgctcatcatgttacctctattccggtatttcctgataatttatccgaattgaatttatcttcatgctatacactggagtctattccaaatcttcctgatgggttaaaaagtttaactatatctggaaatcagaccattaaaatttcatatttcccagatagcttagagtcactatctatagatatgcaggcatatgaagaaaattatactttccccgcattaccttatggattaaagagttttactgcatgctatggtaaatttttgcctccccttcctccgcatctatcttctttgtcattgcaaaatttctctgaaatattatgtgctgagttaccatataaattagataaattagatttacaaaattgccctttcttgccattaatgaaaatgttacctgaggagttaaaagaactaagtattgaacttatacgaacagttcccggtactgttatagatgatattttgcctgataagctaaaaaaattaagtatcaacttttgtgataatattaaacttccagttaagcttcctgttaatttaaagtctatcaatttatcctcaaggacccctattgcatgggaaataccaacctgcaatctgcctgcacatatagatattagtaccgatggttatgttaagcttaatcctgaatttcttaccaggagtgatattacctttagtaacaaacctgcaggagatgtgttaagttttcagcctggagatgtggtttatggtttatgtaaggcaagagatcgagtaaatactttagttaattcgttatattatttttcaaaaaaagatattattattcaaaatacattaacagatgcggtctgggacaggaagaatagagccgtgtttaataaagatgagaagatagcagaaagattgaatgatgttcagagagggattttttttagagaatttttatctcaacataaaaaatacaatattaccgaagataaatattcagacttatccaatgaggagtgctggataaaaacaagtaaagccggtcttgaatttcaaacacgattgagggaacggtcagttatttttgtcattgacaatttagttgatgctataagtgatatcgcaaataaaacaggaaagcatggtaattctattacagcacatgagctaagatgggtatatcggaatcgacatgatgatctggtaaaacaaaatgttaaattttttcttaatggtgaggctatttcacacgaagatgttttttcattagttggttgggataaatataagcctaaaaatagaaatcgttgactttaaaaaaatatgcaattaatatatttatatatagagcagccctattggagttaaggatatatactccccctaactctagactacatgccaactttacttagtatcatattttcttgctacatatctgtttggcaagggtatgaataaaaaacaagattaatttaattgatatcgcaacagataagcacctgcatttatctttaaacttttttatggccaaccagatttttcaccatctgcgcacgtttattcgggcatgcgttgaaaacctgcaaaaaaagaaaaatatcgatgcttattattttttctttaattaaattttcgctcaacaaacttaattattaatccaatgacagtgaagtgtgaactatgctgagcataaacgacatcaatagcaagggcaagggcaagggcaagggcaagggcaagggcaagggcaagggcaagggcaagggcaatctgagtatttacaggtgaaattatgaaaaatagtatatttttaccattgcttctggtgctgtcggcaacgaccttttcggcattggtgatggctgccagtcattctccccaccagataatacaaaacatttttccagtggctggccgccagatatcctgaagcaactgaattggtctcaggtttgtggttgttagtatactgaatattacttcaggatggcatgttttattgacaccagcctgatttttcacaacgttatattacccgtttacagataattcccagctaataaatcaggaagttccagatgtaacagaagttatgaggtgtattaattgataggtctaacaggcttgaattacttttctttaaaaactactgcatgtaaaagggtctcctcttgttgtgatgagattcgtatatatttatatcttagtgatttatggatcatacttgtggttttccttaggaggtaacatgtttacaattaatagtactaacagggtggcgagcacaatcgctccatatgcatgtgtaagcgatgttaatttagaggacaaggctacatttttagatgaacatacctcaatacatgcgaatgattcttctttgcaatgctttgtcttaaatgatcagcatgttccgcagaatacattagctacagatgttgaaggctacaatagaggattacaggaacgtataagcctcgagtaccagcccctggaaagcattgtttttctactcggcacccctgcagttttagagactaaagagtctttatcattaccagtttccccggatgctttaacccaaaaactattaagcattagtagcaatgatgaatgtaaattatcaggtagcaccagttgcactaccccagccagtcataacccaccgtccggttatatcgctcaatacaggcattctgcagaggttttcccggatgaataaaacaaagcgttataaatagctgcgccgaatagtagatcactttgattgaactcagtccggattgtgtgatttgatcaatcgccaaaaatcacaaatcaccaaccggactaagcgatgccgatcatagcaccaattccccgtaccgaacgacgcctgatgcagaaaactatccataaaacgcgtgacaaaaaccatgcccgcagactgactgccatgttgatgctgcaacccgggagacagtatcggccacgttgccagaacgctctgctacgcccgttcacccattggacgctggattaactgattcaccgctgacggtgtggaggcgctggacaagtgtgatgcggataatcctcatcatatggtcatgtatttttcataaacaataaagctcgtccaggagtgcactaaataacagattgttagagcttgcttaaacatcagtcgtctaagtttaccttaaagcaagtggcgttttatgtcccatatatgccccatcacatcctcgttccatcatcaaactcactggatctcatgatgttgtagggaagtaagccggagagataatttccttctgtgccgtgccggcagaagaatttatctggcacgctgtctcgcgctgtatggagtgtgaagagccaacacccggaattgattgaacaagttacttaacacgcaatagctcagagtatcttgtggtgtaccgcagcgaaagtatttctcgcttcatagcccactgttgcggtatcccctgcccggtgattttctggttgtattgtcatgtgcgcatatttaagccagtttagagactgggaattttctgtacagcgtcgacagccccgcatcataaataatcgttacctgctgtcgcggtactcctgccctaatcaggcgcccggcctgcgctcccagtggatgggagccagtaaggatttgaatagcacatgaactcactctcatatgaattaatttacattggaaagaaaatataatagcgcttatcatttttatttaagttaaatattttataaatggtttttatttactcacctgatggtaatgaataacgtttaatatctatagtaaaggatgctgtaaccgtaaggatagtgtgccaaaatttaacaggcaacgtattattaaacacgttaagagcgtatttttagcaatgattttaatattaccatcttcactatattctgctcttacaatagcggcagactctcaagatcataaaaaagaagaaacaattaagccaatgcctcaaaagtggtgtaatctttggcctgctggcatacccttccctgaagattggtttaaaatgtgtagaggttattgagtataaatttaatatactaaccagtaaccatatcagttatgacagacaggtcttcttcatatttgctataaataaggcctgagctttcctgacaaattataaactactggctggtttctccggccagacaggctttaaagtatcaacacggtttacctgtacccggtactttctccatgccagaagagaagctttttctttatcggttgcttcgtccagatccactgcatcctgtaacggcgcgattttttcagatgccatttgcaaaagacggcttttggtcccttcagcttcacgaagtctggccgctgtttccgcagcttcatccttcacccacgccttaccatcccatttctggtattcaccgtctggtgaaactgatgtgacattttcaggtagcgggccgggagcggaaatataaacctgattgccggttgttgtgtcgtaaaccgtctcgccgcggtggtcctcatgcagactccacgttccggtttcagcatcaaatatcgcaatatgactggctggaatatccgggggcgcaatatccgtacaatttgccggtaatccagtgtgtggcgggatatatgcatcacctgcaccaataaattcgtttgtatctgaacgcagattaaaaattttaattgtctgcggggtatcgctcattttaaacgtcattttttactccggataaatattcaggtttcaggtgctttccatgagaattggggctaaggaaaacagcatggctatgcgcaccaatataaatatcatcaacctgatgacggggactgatgcaggtgttacctgattttttgcaatacgttctgtaatcaccaaaaccgatatattccgttctggcgttcggacaaagcgcctttgacggacagtatgccgttgtactgaatacagcattctggcgggcgctggcgtattgccagttaatttccgtggtgcagttaataaaaccatcccacgccagcttcatttgccgggcgacactgcccggggatacctgaccacacccggcccccatcgcagggaatactaccgatttaattttcctgtcttccccggcgcttttattgtgctgaaatatcgctaataacgctgcacgtgttgcattataaaccgcgtcggtgccgtcgattatcagcggaacgcgcatcgtcggggcgtgaaccagccacggatatttactgttacccgtttcaataacaaaggcggtgccgacgggctgttctcccagatattcacggaggatatgttgctgtacccgttcctgtaattgcggcccgaaatatgccgtaatagcagcatccacaccaccatccataagaccaaagctgttggccgcactgaccatgcagtcaaattccggtatggtttcaaacggtccggggataatttccacattttcggtattctgaaaagaatgttcaaaagccacggccattgctggcacgggtgctgaaagaattaatttaatcatgccagcctcactatgtagttaaatgcaatatttttaaccgtggtttccgcattaccgtctgcgtccacaataacgacgtgaccgtgtggaccgatatacatggtgtgctcgtgtcctccgatataaactgtatgcgcatggtcgccagcggcctgtgtccatgcaccacctccaggctgaaatgaggtgtgattggagtctccccagtatgaattgatataaccgccgaactggtgagtatggttgcccgtggtattggtcgatttcgtgccgtaatcaaaagatgaggtagattttgtccctaagtcagtatcctgcgcccgcgcggtgtgcgagtgcgatttattgccgtccatttcttgcgacaatacggcacgtccactgatgggcttaccctttattgtccagcctctcatgtcagggataacgccggacggatacgctatagccagtaacgggtaagcagatttatcgaaggactgcccctgcatcagagcgtaacctgccggagtagcatcagatggccatgcaatcgccgcccctactggatgcgaatccggaggtgggtttagtgtggtgtaaagcattgcccattcggaccactcagcatcggcggtatctcgatggctgcgaatatatgcgggcgctggcgcaccatttgtcccgctccagccaatgaggatttccccatcaccggttccggtcagacgtaaaatatttccgtattgcgtcggatagccattgttgtagacctcgcccattatcaggccgccatcgctgcctcttgtcgtgccagtcagtgccggaagcgcgccgcgtgatgcaagcctgttcgctgcgacagccgtaccaccagcaggcaacgcaccagcagccttatcaattgtgctccgtaaaccaacgtattcgataagaccttcaatgctttttcctgacagcgccgtcagtgtatcgtccagcggctgcttgcccgcaatcatgttagtgatagtggtagcaaaattaggatcgttacccagcgcgtcagccagttcctgcagcgtatccagcgactcaggtacggaaccgaccagtgcagcaatcagtttacgaacaaactcagcgtttgcagtctgaagtcccttagcgtcatctggcggcgtcggtgtggtcggcgttccagtgaataccggactgtccagcggcgctttggtctgtacctcgtccatgacagcatggaccgcctttggcgtggctgccagcgcttcgctgtcactgtccgtggcgctgcttaacttaacgataccttttttcgtcaggctggcatcttccagggaaatcacgtccgcgatgtcttctgcccgttttgcggcatcttctgctctggtggctgctgctccggcagcagtactgctttgcgccgccagtgatgcgctggtatcagatgcggcggcgtgagtggatgcctccgatgctgatgacgaggcggctgttgcgctggccgctgctgtacttgctgacgttgcagcgtttgtctcagatatttttgctgcggctgccgatgcggctgccgccttttccgacgctgccgccgcagtggctgacgcacctgcatcaccggcactggaagccgcctgcgtttctgacgtcttcgcggcggtttcggatgctccggcgcgcgctgctgatgtctgcgccgccgtcgcgctggcggctgcggcagcagctgaatcgccggcggcagtacgggagacatctgcattcgcttcagatgttttcgctgcggctgccgatgcggctgccgccgttctggctatgtcagccgacgccgcgctggctgatgcctccccggcttttgtggtcgccgtacctgcgctgctctccgcagatgctgcggatgaggctgcctgtgtggctgatgcttctgccgctccggctgcattcactgctgccgtggcgctttccgctgcctgacctgctgatgtctgcgcctgttcagatgcctgccctgcggcggtggcattccgcgatgcctccgatgcctggcgggcaacttcttccaccatcgcctcaaaacgtcgcagcgcctccgggcggacgtcgtcttccgtcatggcccccagaaaatcattcagggtgcccggttttgaatcatcgtagaccgtaataactccggcatgtgacgggggatacccttccaccaggagcgtgactgtgtactgcccctgctccacatccatgctgtagcgcccggcgtcatccggattttccgatgccaccgtattcacgaccaccgtcgtactggtccggcaggccttcagctgaatggtgcagttctgtaccggcgttcccgtaccatctttcagtacgccggaaataagtactggcatattgcctccataaaaaagcccgcccgcaggcaggcttcagattcattcacatctcagcactgattatccgggtcacgtaaatatgccggcagcgaacactggacgctccgcgtgattatttgtccctttgcctcgcggtgctgtttctgcccgcggtcagtaccggtataaatccgggtctggttttcaatattgctgttaccgcttcctcttccgttatcggcaacggcagcggtggaaaataaaacggacagggaaacccctgccgccagcgaaattacgcgcgacatagtcatatctgttccttgttaaacgaaagagaccggaaatccggtcagtttgtgaagttgttccccgaccgggaaaccatcaccagcggccagacggaagcagacgtggtgtactgcccacgaaccctcagagaaacgctgatatccacgacaggtgaagtggtgtagaccgaaaagacaacggtctgatacatggccggaagccctgcggtatacgggataacctccgccgttttcacctggccgttaatatttatcgtgacggtgatggcaccggagccaccgttacgctcacagttagccatcaccgtgatggttttccctatctgataggtggcgctgtcggtataccgtgttgaggtgctgcgttcgtcgttcgtctccctgatgctcacgccctgcatgacttttgagccgcagatatcaccgacaaactctcttgcttctatcacgccagaaaacttaccggaggtggcattgatttctcccgtaaacgagccagatacagcgttgatatgcccgctgatatccgcatttttcgcagtcagctttccatccggcgtcagggaaaatgccggaggattcccgccactggtaatggtcggcgcgctcagatatttcaggaacgcctcattcatgattatctggtcgccctgcatgacgaatccgggcgtctcgtttccgtttgccgggttaatataagcaatgcgatccgccgccaccaggaactggcttatcttcccgtcaggcatgtcttccatgctcagtccaagtccggccacataatatttgccgtctttggtctgctctattttgacgccccacatggcgttccatttatcgttagcatcctgccactccttcgaaaactgctgcagtttgctggcgttatcctccgtcagttccaccttctccagcagttccttacccaggtgactttcagttatctgccctttgaaaaaatccagatagcctgcggcatcgttgctggcctgcccggtcgcctccacgaatgcggatttaccgacctgatttaccgcccggatataaaaatagtaatccctgccgggcctgatattcacactggccgctatccagtacagcgccgttcccagatatcgtgcggcgttttccacctgatggatatccgtaatctgcgcgtctgaaaaccagaactcatactgcaccgtcgggtcgtataccgcctgacgcggtgtggctgtaatctggaaatagccaggggtgagttcgataaatgatggtgccgccggcgcggagatgctgaactgtgtgctggccgggtctccctgttgtccctggctgttcaccgccctgacggacagggtgtagcgccccggcgtcagcccccggaaccggtactgcgtatccggcgttcctgcgctgcttaccagccggtcactgccatcttccgccgccacgttcaggcgcaaagaaaacgaggcgcccttaacgactcgcggtgtgtcccagcgcgccagtacctgatactgtccctcctccgccagaatttctgtggtcagatgctgtatcgccgggggaacggtgccgtgaatcgttccgggttgcggatcgaatgatgccccgttgtccacgatggactctttttccggcacatgctgtacggcggtgatggcatacgttccgtcgtcgttttcccggacagccacacaccggaagagacgctggcgcagcgacggcagtttcagcccccagacgctgtattccgccacgccgtccggtatccggctgacctgaacctgcacaccgtcggtaacagactgcacgtccacgctgaccggcaagccttcgccatccatcaggcttatcagcgtggtgccggacgacggcagggtaatctccctgtcaagggtcagaatgcggcgggcgcggtcaacggacagaatccgcccgcccaggctgatgccggcataatcctcgtcgcaaacctcaatcacatcaccgggaacgtggcgcagcccctccgcacccacactaaaatcaaccgtctgggtttccagcagctccgtttttatcagccacagcccggcgcggtgcgcctgcccgcgactggtacagccaaacgcatccatttttaccagattgcgtccgtagtgactgatggcgaccgtgtcttccaccagttccgtggatgtctgccagccattatcagggtcgatccagttcacctctaccgcattatggcggtccttccgcgcactgaagctgtaacggaacggtgtgccctcatccggcattaccacattgctgcgggtataggtccagactgtatccgagggcctgtcctgcacgaaggtcatcatctgcccgttccacaccggcatacaacgcatggcggagcagaagtcggtcagcacatcccacgccttacgctgctgtgccagatacgcattaaaggtcatacgcggctctgtcccgccgaatccgtcagggaccatctggtcgcagtactggcctattgcatacagcgcccacctgtccacgtccgccgcgccgattcgctgtcccatgccataacggggatgtgtcagcacatcccagagacaccacgccggattattgctgtatgcaggcttgaacgtgccgtcccagatgccgctgtaggttcgcgctaccggatcgtaattcgacggcacatgaataatccgcccgaaaaaatggtaatttcgcgtcacctgctggctgccgaactgctcagactccacctgcaggccaattacggcggtgttgggatagcgctgccggacatcaataatctcggtatacgacgaccagaccgtgttgttctgtaactggtcagtggtactgtctgccgtcacacgtaccatccggataccaaatggccggggagggagattatccactatcaccgaggccagatactgtgtggttgttttcccggtaatcgtaatctctttttccaccacccactgaccatagcgctcaagatggatttgcagcctgaccgatgtcggattgcggtcgcccttgctgttggcctccaccagtgactgcacgccgaacgtaaaacgcaggcggtcaatatttgcagccgtgatggttctggtcaccggattgtcgtatttgacctgtacaccaagcaccgtctcggcgccggacgattcaaatccctccagcggggtctgttcctgctcaccgacgcggtataccaccttcacgccgtggatattcgtgttaccgtcgcggtccaccaccggcgtctggtttaccagaacactttgcagaccgttcaccgggccttctatcggtccctcgctgatggcatcgatgacgctcagcagctgcgtggatttaaggttatccggtgcctcgcggggcgtatgcccttttccgccgccctttcccatttattaccccgtaaaacgacaaaaccgcccggaggcggttctgtctgaatctgttctgttgtcagcggccaatcaccacaacctgaccaccatctccttcatcagcggtactgacttcctgggaaatcacgcgtgaccccacctgcatctcgccgtacagcaccggcaacgtgttaccgttggcaaccatattatccagcgacgagaaatacgtgttctgcctgccgttatcggtctgcctcatttcggacattttaggttttggtgccagcatctgcgccacaccgcccagaaccatcgacgccccggtcatatacataccggataccgccgccgctcccagccagcctgccgggttccaccaggcaacggcaatcagcgccgcaccaagcaccgcctgaaacaccccgccagatttggccccgcccagacgcggcacaatatgaatcaccgcgccaggcggcagcgggtcatgcaggctggttgtcagggtatcagccgtaacatcgtctccggctatgcgtacctgataccagccgtcgttcagtttctgccggagaccgggcaactgtaccgccagtgcccggacagcttcagcaccactggctacctgcaggctgacgcggcggcaaaatcgttgcagatccccgtaaaggcagatgcgcgccatgcccggtgtcgccagatggagtgcgtgcgtcgttgccatttgtcggtatacctctcacgtttactcagttgttcaggaatatggtgcagcagctctccgtcgccgcagtaaatcgctgcgtggttcggaacggaggagccaaagcagcaaatcaacacgtcgccgggctgcgcactggctgcgctgacacggtaaaaccccgtcgtctccagattatccagatagagattttcaccatgccgccaccagtcgtcgtcccggtgaaaatccggcatatcaatccccgccagatgataggcatcacggaacagcgtgtaacagtcaaaaaccccatgtttataatgccgtccggtcaggtgtggcacacagcggaatttatgtacctggccggcgcataccagccaccacggcaggtcgctttgaacctgcagcctgcggtccacatcgctcagatacggctggccgccaggatggctgtgaaccagcgccacaatatccccctgcgtttcagccctcagccagtcctccggcgccatacggaaataatcctccggcgcggcagaaatattcacacaggggagataccgttctcccgcctgtgttctcaccacgaagccgcacgactccgcaggcgcacaccgtcgggcgtgcgccagaatatcctgttctttcatgatgatttactgtgaaagtttattaatggagaggaaaccgccaaagtttccggtattgttacgcagggcgcatccccgggcgcagcggctgcaggcatcttttgccggatcggcggtagggttatcaaattcatctgcgacagctggtcccgtataaccgcattcgtcagagcggtatatccatgtacaggtattggccagcataattcgcccggggaagacacatccgtccgtttcagtcggtgttgccaggacaaatgtcgcacttaccgccgtcagatcactgcactgctcgatcacccatcggcttacggattcctgctccgggtcagcctcctggttgccgttttgaaaattcacggcatcgagaaaccgggcatatactatcctgcggatgaccgtcgccccaaccaggctatgcaaatcctccaccattccggtcaccataccgtaaagattggataccttcagtgacgggcgcgcagctgcgcctttgccgttcatttcaaatccgcaaccgtctacaggataaacgtcatatttccgtccctgccaggtaaccgcctcccccttttcatttgcctcgttacaaaaaaaataacgatcaccgccagactgtgtcagatcgatttcccacaaagtgatcctggcggactgcgccagtttagcggattcgttcagcgtatcctgcgaaatgtcctgcatcactcctcctcagataacaacctgttcaaaagtcgtggtcacagtcacccaaagagagccaacgttaatcgaccatttgcggcaaatcacccgaatttgtgtccaggtataaggcggcgtccagagaaaggatttcactccaccgtggcgggataaaaatgcctcaaggttctgatgttctcccttacgaatccggaccgttacgttatacttcgccagatggttgttcagcccggctggacgccgttgttcatacccgtcacccagttttatggaggtgacttttggttctgattccactgtcatatcagggcggatcttccagttaaatgtttccattgttatcgccctcctccagcaatacccccgtcacgcgactgctgttgccagaaatcaatggcggctttttttccaatgttatatacggcctgtaatgcctgcggaccaatctgtccgttgccggcgtcgttgtggatttcaatgttgtactcaggcgcaaacatcgccatccctcctgaaccggctgccacgacacccagcttaccgtcagcaccacgacgaagtggtaatattgcctccggtcctgcctcgcccatcaccccggcacctttggcaaaagcaaaaaatgtcgggcgattaacaatgctgccgctgtactggctgagtcctgccgaacggtacacgccgccgtccgcattcggaataaccgacagcgccgcagaactgtatgcccctgatggtgtactgccgcctgccgatgtgccaaagccgaacattgccagcactgaacccaacagtttagaagccgcaatacgtgcctccatttttgcaaggtcagccaggatggagaccgtcaggctccggaaactgccctttccggtcacggcaaaattcgcgatactgtccgccatgccgttaaatgcgtttgtgaaaacgttctccgtcatgcctgccacattgccgccctgcgccagaaagttatccagcgcccgcgacgcccccagcgtccagtctccctgcgcagcgtcaactttcgcattgtaatccgcccactcagccagccggcgatcgagactgcccttcagcgcctgctccgcctgacgatattcgtcagaaccgtatgtcccttttgccttgctgtcgcgtttaagctgctccagttgttcctggtagtgctgctgaattttcagacgctcttcgtatcggccacgttgctgatcgcccatacccattgtggccagcgccattgcgtgctgttgcctgacgcgggattcttcgtcagcgagctggctggtcaatgtgagcgtctttttcttcagttcattaagggcattctggtgttgcaaatcctgttgtgagatatccagcttctgtagcgcaagcgcaatttcatccttatgtgccagtacgctttgttcatccgccgtcagttttttaccggacaaatcagcgatgcgctgctgaaatgacaaaagctgcttatgcgcttccgtcattttttcggtcgtggaaagcttcgcggcggcaatctgcccttcagtctgcgcctgttgctggctgtactgcaaaagcagtcgcctggcctcgtcgttgtggtaagtctttggctttttcgcctgttgtgacaacgcctttttatgacgttcattttcgcgctccagtgcggcattgcgtacagcagcatcggcatactgcatggcggtaatgcgcgccacctcccgttggtgccgcagggattcagtttcattatcccggttcagcgcggcgttctgctcgttccgacgtttctgcgtttcctgataattacgctctgcctgcgccttcgcatccagcaggtccttctggcgtttctgttcctgaagttcgttcagctgctgctgatcgtattcagtctgggaagaagacaccgtccagggcgtttttctgtcgcgcgcgattttttcctgcagtgtcgcgatcttttcatcgagcgtgtcttcccgcccgatatccagcatccgatcccatgcccacttcgccgcatcaccgacagcattccatgctctttcaatccagcccagattgtcgtgtacgtcccccatccgcttattcatttcttccgaatacgcggacatggcaattttcgcggcatcagccactcttccctgctcgcccagtaccctgatttgttcaagctgggtggctgtcagaaaatgcagtgtcctgtccagttctttcgccgcattcaccggatcatcccgcaggcgtttaaactggcggatggtttcatccactgattgtcccacgttttcctgcattctggtcgcggtacgggataccattgccattgcctgcccggtaaacgctccgctaccgaccacctgtgccagcacgcctgcagcatcgtgctgcgtgacgccatttccggcgagcgacttcgccatcgcattaagctggcctgtggtttttccggcataactcccggtcagaataagctgtttattgaacgtctcgctttccttagcgccttcatagtaggccttgcccagcccgtaaacagcagcagccacgccgccagccagcccgccgagcatcatgcccttcggagacatcagttgctcgatccacccggcgcggttagcgagcgtgataccacttccccgcagtgccccgaaattcccacgggccagctcaccagccagcacgcccagttcacgacgggcagcagcgcttttcagtcctagcgtatgggtggcagttccggtacgctccagtttacggatataaatatctgcggcgctactgacacccagttcagccgccttcacccgcagcagctcggtacgggagaggccctgtaccgtcgtctgctctttcaggcggcgtataaactgtgcttttttctgcgtggccagcgcttcggcatcggtaagctcacgggtcttcctggcggtttcagacaccagcgccagataatcgccctgtgagatatctccgcgtcctttcgcctgtcgtacctgcgcctggatacgctgcagctcctgcagaccaccgcttaactgttttacactgtcaatctggcggtaaaaagcagcacttgtcctgtcctgtgctgccgccacagccgctgactgcgcctgttcctcacgcagtttccttcccagtgcctccaccctctgtcgcgtctgatccacatccgccgccagacgcgtactggccgctgcgcttttctccacagcggaactgtacgcggtactgctggcagtcacttgatccagactggcggacgtccggcgcgtcgcctccgtctgcttatccagaaaacgctgcatccgggccgctgaacgttctgagtcaccagccgcatcgttcagcaattttttaatgcgcggaacttcgtttcggaactctgcgctgtcgatacttaaatcaatgaccaggttcgctatctggtccatagcggacacctccggtaataccttcgcccaggatcatcagttcatcatccgttttttcgtgcaacgactcaggatcagtgatcaggctgaacatttctgcatcgtgatgcgtgcctgtaaccagtccggaaatcagcgatttcagcgttgcaaactccgcatccagcaacatgtcactgaagctgttcttcccgaaatgctccgcccactcacccagctctgtcgcactcatttccgccagcatctgccgccagtctggtcgccggaactcacgcgcgagccgcatcacaaacgccagctcccggttcaggacttttccggcgtggtcgtgtccttttcactcccgctgtcgtcttcctgcgatgccggaagacgcataccactcagggacagaaccatatcagcgccacgtcccagcgcctcataagaccattccagtctgacggactcatacagggcgcgggcctcctcctcttttttgctttcacacagggagcgggataccagccatgcattaatatccacccccatctgcataaattctgtctgacgctctgcttccgtcagggtttcaggctgtgcgtcatagtctgccgtccgctgctgaataaacttcagataatccacacgttgcagggcagaaagctcactgagcacgatggaatgcccaccgtagttaaaggtgtctgtattgagaaacatgatgattttccatagaagccccggaaccggggcggactgataagagagggttatgacgccgtcactgtcactgctgccaccgcgacaagactgccgtcactgctgataccaacaatattcacgctgcccgccttcacgcctttaaccgtggccacattatccttcagcgtgacggtggcgatcagcggatcggcggtcgcaacctgcagcgttttatctgacgcgttatcaggttttaccgtaaatgtcagcgtggtggtggctccggcagccaccgtggcactggccggcgcaacggtcacgccggatacgctgactacgtcaggtgtatcctcctccgcaagagaaggacgcccgacgccggtgatttttacgctgcgtgtcatcacctctttggacgtcacggttttacccagtgaactcagccagccgcggaacacatcaaccgtcccgttaggatacctgatacggaaggcgcgaacttcgccggtgtcaaacagctcaaccagttttttctgtccggtctcaccgggtttccaggccagcgtggccgtggtgtcaccgacgcttttctgcccctgcgtagtgcttttccagtcggcattttcatcatcaagatagtcatcgtcttccgcatctgcactcatttctccgggctgcagatccttaatacctgccagtcgcagccagtcatcatcagccagtggatttttaaacgcatcgccgctgccggtatacagccagaatgtggttccggcgcctttcgtttttaccagtgggtttggtgttcccatcatatcctcctcagttggtataggtgatccggtaagtaatttctgccatcccccacgttgccatttcgctgtcacgctggtagtcataacccagcggggtcatggtatcgataaggcgctccagaccactaacctcttccagcgcaggaaagattttttcttccatccagatatcaagctctgtatcaggagcctgagccctcagaaaaactgccgtatggagagtagcctgccagtcatcctcatcggtcataaggcctgtatactgtgcgtctgtcagccagacagctattgcgggtaaatcttcctgttctacgaaagcaggaagtccatcaaaaagagtgacaggtgcgccagtcacggattccagcttttccagaacggcccggcggattaatgtgtgtttgctcatcagaatgcctcctttcctccccggcctgaaggccggggaggaaaggaggcggttttccggctaactgtcttttgcataatcacattttcctctttaatatgtgaagccatgaaacgcgcatataaataccggttttaccccacgactgagcaggctgagcttttagctcagacgttcggttgtgtgcgtttcgtctacaactccatcctccgctggcgtaccgatgcgtactacgagcgaaaggaaaagatcggttacctacaggccaacgctcgccttacggcgctgaaaaaggagccagaatttgcctggcttaacgacgtttcctgcgttcccctccagcagtctttgcgccaccaacaaaccgcctttgctaacttcttcgccggacgggctgcatatccggctttcaaaagcaaacggcacaagcaggcggctgagttcactgcgagcgcgtttaaataccgcgacggcaagctgtacatggcaaagaacaaaatccccttagacgtgcgctggagtcgtccgctgccgtccgtgccgtctaccgtcaccatttccaaagatgccgcagggcggtactttgtttcgtgcctttgcgaatttgaacccgcatcactgccgatcacctcttcaatggtcggcattgatgttggtttaaaagatttgttcgtcaccgataccggattcaggtccggcaatccccgccataccgctaaatacgcggctcgcctggcactactccagcgccggttaagcaaaaaggccaaaggctcaaagaaccgcgccaaagcccacttaaaggtagcccgactccacgcgaaaattgctgattgccgactggatgccctgcacaaggccacccgcaaactgattaacgataaccaagttgtatgcgtcgaatccctgaaagtgaggaacatgatccgcaacccgtcgctatccaaagcaatagcagacgcgagctggggcgaacttgtgcgccagctccggtacaaaggcgaatgggcggggcggtcagtggtagccattgaccagtttttcccgtcctcaaaacgctgtagctgttgcggtttcatcatgaaaaaaatgcctcttgatgttcgtaaatggcagtgccctgagtgcggaactgaccacgaccgggacgttaacgcggcacgtaatatcaaagctgccgggctggcagtgttagcccacggagagcctgtaaatcctgaatcgctcaaagcggcttagattcggctcgttgaagtgggaatccccgtccttcagggcggggagcagtcaacgtgaaagataaagcctcagttgttgtttcagggcataccccagttgcttcggtatttcctcgtcaatcaagctttgtgtggcgctttcgaatgcctgagtcaatggtccggaaagaggaattttcactacatcgattggataacggtttttcccgttaacgcgtcgcataacatgccagcgtccgttagccagttgctgaataaaggcatcccggaacagatatggcccgattttaagcacacttccgcgatacagcagtttgcccctccgtttgctcatcctgacctgtgcagcgcccaactttatggcgggaaggtttccccggttaatccgtatccgggcagagcgtttaccgtctgtaccggctttaaataacctcaccctctggcgaaccagcttcagcggaagtcctcttacctggttatctccggcgacagtctcccgcgccaccttacgggttgccactgaaacagctttctgcgccacgcgattcacagcccagatactggcccggggaaccatctgtcggtcaaggctgttcagattccggatcgcattttcaagccctttcatcagaatgcctccgggaaaccccggcctttaggccggggagcagtcaaacattcctcccgtcctgcgccggttatccgtcggcggcgtccccctgcccagcagaataatactgctgtctccaccagccggagtgatgcgatccacccagaaggtgtcaccgagaatggttagtgtgtccgggcgcttcagatggactgtcagggatgttttgacaaaaaatgtaggcttgtctccctcaatccggacacctccggcggcatacgacacactttcaggatcgtcaaatacgcccgtaagcgtggcccctgccagaacgccggaggttattgttgctaccgttcccatcacccggaggatggcatcatcagcctgagaaatcgcggtatcaaacaggttttcggactgcgacatatcgccacccttacagttcaataataagtcctgcagcaatcagctcgtccacatcgtgttgcgaaatacgcgccgggtttcccgccataaccatatccagttcccggttactgtccggatcgatggcgcagatgtgtagtgtacgaagcgccctgataagtacccgttcggatctttgcccgatcccgggcggcactatggattcatcactgtcattttccacagcaggcaaatgctccgcctccgcttcctcttcccattccatgacacgctggctgagttcagcggcgctcccggacacatccggatcacgaccaagccgcgtcgcaagctcccgcagacgctgtatattctcttcttttgttgccataaaagatcctcccgcaatttgtaacaataaaggcctgaatcaggccttttgggatgcttaaccgacagtgacaatgacaaactcatccgggtccggcaggaccatcagcggcgcagactgcgtcatggtatattcattcgccggatcccccaccgtcagccagtgtttgggataacgggtggcggcaacaataccctccgcgagcgcctgtgaatcctgaatggcaccatagcagcggataccttctgccgccgtatttcccagaaccagagtcccttcaggcaggtaacgcttttcggtcccgttatcagcaacataggatgttttagccaccacaatggccaaatctccgtaataccccttgaacgacaccacagccccaaggtccttcaccgccgtttccagctgagaatttgaaccgcggcgtgtatccagtttttcacggaacagcttaaaaccgttcagcagacgccagactttcccgtccatcacggcaatattgatcagaccggatgcctggtcgcagtacatatccagatcataagtcgggtcaaaggtttccctgtcctgctctgaccattttttacctgtggcctgaataatgttattcccggcggagcgaccaaaatccacctccacggtgtcaaactgctcgccctgcatggtgtatttcccgttcagcaccgcactgacggcctgcatctcctccacctggacgatggccttctcttcctgcttcaggttatcggtcagaatgcgcagacgacggtaggccggatcgttaagcctggccgggtcttcacccggcagacgctcaacaacctgcgcatagttaacttcatgcttcggtttgacataccccggacgcagtacgcgcgtttccccgccgcggttacgcagaaccttccctccaaccaccggagatacataagcggcaatcggtgtttttccggtaattttgtccagcatgacttcctgggtaggaaatgtcacagtacggcgaaaaaacaggctcaggaagagtgggttaaatttaactttctgctcggtataacccagcaactggcgggtggtaaacaatcccataaatggtgtcctccggacgttaaatacgataaaggccgcttcgcggccttcttattacggtaaagcggcgtgactgacggcgcttccggcgaatgcatttgcctgcttaatggcatccacactcttcggccatgccagtgattctgtggcaaaggtgccgctcttccagtacgtcagcaggttttccgacccgtccagctcaagggccagaaccccgaccgccgttccggccttctgcccgtcccaggccaccagtttcccggtggtatcatccagcatcaggggcgtcagcatcggtgtggccgccgttatcccgctgactcccgttgcggtatgtgccggatcgttaccggcgaaaatgcggttatccgcacgtttctcaatagtggtggtaaatgacatactgtctccttatcaggtggctgaagtaccgggaatactcatcaacaacgtcgtttcggtatcattactgtggcctttgccgccggatatggggcccggggaatgagactgcatgaaagcatcaaatgcgttgttcatgctcagccccgcattaccggatttgtccggcgcggcagccagcaggtcacgggcctgatctgtggtcataccaggcatgacagccagtttttccgccaactcttcacggcctttcgcctcatcaagcgccatcacggcatcatgaagtgacgttgccgcagcgatcggcgatgctgccagaatggttctggcctgttccaccgtcatctctggcatggccgccagtgtctgtgcgagtgtttcccgaccaccagcttcttccagggcaaggatacggtcagcggtgctggtcgtgtccgccggcgcggcggcagccagaatagacttcgcctgagcaacgctcattcccggctgcccggccagcatctgtgccagtgcctcatgccccctggcctccgggcaacccagaattcccattacgcgctggttttcctgcgtgacagcgtcagctgcacttaattcaggcatagtgcctcctgtcttgttactgttgatagcttctgccatcacgccgatggcgtcagcagcattcaccattccatctgccagtccggtagtgataatggcctgcccgtcatacactgccgcctccgtcgccattaccgcatcgacagacaaccccgtgtaccgggccactttttctgcaaacatctttctggcctcgtccattcgctgctggtagtcggcatagacactttccggtaatttctggctgggcgtcagatcagccttgtgtgcgccagaatagataagggtgatatcgatcccttcctgtttcagtttttcggcgtagctggtatgcgccatcaccacaccaattgatcccattctggacgtctgggtcacaaggcggtgcgaacaggctgccgccagcaacatggccgccgaacaggctgtttcatttgccagtgcccagacaggtttctgttcgcgcatccggtaaatcatgtcagcacagtcaaacgccccggcagcctgaccgccgggactgtcaatatccagcagaatgccttttacctccggatctgaaaccgcctgttgtagccgggcagtgacaccgtcatatccggtcatccctgaaaagggacgcattccgccgagtttatgaaccagtgttccggtcacgggtaataccgcaataccgttcactacctgataaaaacgtgcctgcggctttccggtcgccataaaatcgcctgtgaccagtgccatatccgactgatccagactttcgttattaccgggaatgtgcaggctgttaatgcctgactccctgcccagcgcgcaaaagaaaacccgcgcataggcgggttcaagcagcaacggagcactggttgcctggctgatgatgtgcgagagattacgttgcacgcttttcctcctccgtctgacggctcgccgcgatctgttgttgataggtatcagtgatccataccggacgcgaaagtccggctgcccgccgttcttcggattccctgacctgctggcggaatatctcctggtaatcctcgcccataatggcgagttctttttcataggtactcagcccggcctcaatacgcatcacggattcctgaacctccttgagtccgtcaatcgccatacgtccggcaccaatccactccgagcggctccagctggatcgggcctcccagaaggaaaacctggcccggggtgcccggataactccccgtatcagcgcctcctccagccagcaggaaaacatttgtgtcgccagccgtccggcaatgaaccggcgccgccccaggaaatagcgccaggactcattggcagatgcgcgggcgctggaatagctgacctgagaataatcacgcgaaagctgctcataagagacccccagcccggcggcaatataccggagcagcgcctgctccagcgctgaaaagccattatcggaatcctgcgcagtctgcagattcagctcatcacccgggtacaggtggggaatttttacaccgcccagtttgatactgttggtactgtaatagcgggcataatttgccagcatgttaacaaggggcgtatctttgttatctgccgccgtgatgtattcaaaggctttctcggaatcgagttcgctttcgatcgtggcggcgtacatggctttgacaatcgcggactgaagctgcgttgcctgcagggtatcaagcatcttcagccgctccatcacactgtaaaactgattggcaccgcgcgtctgtccgtcctcaaccggctcgaaaatatgtaacatcgcgggtcgtccggacggcagaaaacgaggaatacgggtccagcgttccccaccagccaccggccagtcatcatcacagacatgataggcgagggcttttccattccggtccgtttccactcctgcgcgaagctggcggtttccgcgggcataccccggcgtgtccacccgtttcggactgacagccttgaatcgggtacggaaaacctgcgtggtttcagcgtcccagacaggctggagaaaaatttcaccattaaaggcgtgaacgcccacgccttcacggatgaactctgtaaaagtacgcttcccctcggcatccatttcgccaaaaataccatcgcaatattctgtccatgcagcttcaacctcatccacaaaactcttcgctgcgctctcacgcataccaagatagcgccagtttggacgatagctgataagaaacaggtgtccgacaatatgatccttgtgcagcgccaccgcatttgctgcaataccattattacggaccagatcatcagcccgcgcattgccgaggcgcaacgaaggcagcagcgcggcatccacgctttccgccgggggcatccagtcagccatctgtccgccgaaaccgatcccccgccggtgtatcccagactttcccgcagcggcgtgccgtgaacatccaccagaaccggggtgcgcttcacagtctcacccccacaggtgcccggcggcgaccattgcacagtgacgcctcaagttccgcgacatattttttcagatcccctaccgatgtcgcggtaaattcaacccgtcgcccgtctttctgaaccgtcgccacccgttttcccgtcatcaggtcatgcagcgcgacgcgggcttcctgtagctcagtgattgttgccattaactcctcctgccagcattgcggccagttgttcaagtgtcggggtatcctgctcttcgcttttccttgatgtcgccagcgcctccagatccagttgccagcgctgcacagacacccgtaacgctgcactggcatagacaagacaatccagcgcttcgttacgacgtcctttggcatcccataacagccggaattttccgttaaccagtttctccaccagctcttcggctaccagttgcttcgcttccacctccgtaaaaacatccggattatccggaaagcggatcgcataaggcgtggcttcgtcggcaggcgcagtaaccgcccccattctggcgtaaagcatttctttggcagtatcagtaccgatttcgcacaggaataccccgctctggttgcgttttttaggcatggtaataacgggttttccgtaaacggaggcccctttgacaggcagcacgcggaaaatgccgtgtttttttgagcgtttatagacgatttctgcatcgataccgccgatatcccagcagatacgggaaatggaaatatccgtcccgtcagcatgacgatattttttattaatgacggcatccacacgctgcagggtatcttcatcatcatgccgtcccatgataatttgcttatcaataaggaaagcctcttcgcccggcgcccagccccagacatacatttcataacggttacgctgggagtcgataccagcggtcagatacaccacccgctccggaaccggcgccgcataatgaatcactttttccagcaaaagctcatggctgagtttttcggccaccgcctcttcataaggctcgcccaacgtggtgtttataaaggttttcacaccatttggatctttcagcgcatccagccagtcataaataatctgtatccaggtggtaaagggactgtaagccgtccagatatgaaaggtaatggatcgtggcggcggaacctcctcaccggacgcgctgaaataagccagtccatcgcgtgtccacatgcctgtgttatcgcaaatccagcggcctgctttctgatcaagttccgattgacggatcacgcatccattatgttcacaaaggtaatacaccgtctccggcttgcttttctcccatttcagaccgaacggcgtactgccatcaccgaatttaaggtactgttcttcgccacaatgcggacacggtacataaaaacgcataaaatgcgccgattcatttgccgccttttcaatctggcatgaccctttgacttttggtgtggagccccgaatggatttaggccagacagaaccttcaatacgtttatcccccagcagcgtcggcgaaccttctttctcgacatccggctcaaaagatgacaattcgtcatagcagaccacatccaccgatttttcacggtagtttttggctgctgcaccgccgaggcaccagaacccgacaccggaagaaaagcgtttcagggtaagcgtgttatcacgatgtttacgcccgaaccagggggccagctccagcaatacaggaacatccctgatagtcggctccacgtgggatttcataaaatcctcagcggatgagtcggtcggctggaacagcaggctgttgcgcgacttgtgctctatgaaatagccttccacccccagcaacattttggtatagcccacgcgggcagacttaatgaggtttacaacgcggatcagttcataccccatcgcgttcattatcgctacctgaaacggcagcgtttcccatttgccgggggtgtaggaggactcttttggcagatagtaatactcatcagcccactgcacggtggtaagcggtacgggaatatgaagcgctatcagcccgttagttatggctctgttggcattattcgccctgcgctctccggaaatcatcggtccacttctccacatccgctatcgtggcggccctgcctgacgccctggcgatttccgttctgaccacatcgatgtgcgactggcacagatcaggatatttgcgctgtaataccagcggtacccttgacagtatccctgctatttcctgagccacccgttgcaggatgtaggtgaacagttcggtctcaagaaccagcccttcgcgctcagcatttttaagttcctgcgcatccgcctgggcttttgtcaggcggtagcgctcatagtcgatggtgccgggattaagatctgattccgcagcggcacgtaaatcatcaacctctttacgcagcttttcattttcaatagacgcatcacgctccgcgtaccatgaaatcgctgccgcggtgtcgaacactgcttcgttaccttttcctcctccggaaacaagtggcagcccctggctttgccaggctgtgacagttctgacgtcacaaccaaaaatttcagccagtttttttttattcacgttcatggaaaagtctcccggaaacaggaaaggatctgcgatcttcgtttttaactaaaaacgttatccagcagatcctttctttttttctaaaaaaacctttaaaaacaggaaataaacaataagaagaacggatctggcttttctctgaaaattttcataaggagtgaaatcctgcgacgctgccgccccgtaacaggcagaattcccggaaaggaccctggaaaaaaccgaacagttattgttacaatataacaattaatcattttaacgctgactgagggtcttacatatgaaattcaagagtattgctaaaactgtttttctttttgcactgctaacctcagctggctttgcaactggtaaaaacgtgaatgtcgaattcgataaaggacaaaatagcgcccgctattccggcgtaataaagggatacgattacgatacatataacttccaggccagaaaggggcagaaagtacatgtaagtatttcgaatgaaggcgcagatacctacctgttcgggccaggaattagcgattccgttgacctgtccagatattcatctgaactggatggcaatggccagtacacgctaccggcgtccggaaaatacgaactgaaagtacttcagacacgtaatgaagctcgtaaaaacaaagcgaaaaaatacagcgtcaatattcagataaaataaatgccagcctggtcagggggttcgttccaacaccaaacttttcagccactgggttatttcatgaggtgtaccagtttttagcgtctggttacgtttttgaggtgtacgaaaactggcttatatcagtacgataaaaacgcgatgtggtagtacgcagacccagagacattgtcatgtttatgcatttctgaaactcccccgcaggtaagctccttttccctcctgcgggaattttttatttgcactgcgtccggatgtactcctgcaaatacttcagtttttcctgatcgctgatgattccggcgcggatatcgagaacgttttgtccagcaactggagagagttcgacggtggcagcattgcccacgcggcgggtactggcggttttggttgtggttgtggttggcactgtacagcgtccttcgacacgcacccggctaccagcagcaaggcggcgctgcaaatcagtattcctgttttgtgcatcagctagttcctttgtgtattttgcatcgagggcggcaacgtcacgctggcgcttcgtcatatcggtaattgtctcgttcgccagcttcaggttgtgagtagcagtatcacgctggtacttgtaagtgatagcgttattgcggtagtgatttgccagccgaccggcaacaattagcgagacgagcaacaggccaacaaacatcgttttccagttgaacatcatgacaggaacagagcacgctccgcctcacgccgacgggtaagcccgttcagtaccttgccaccagccttattccagcgcaggaactcatcagcggcgccagcgtaatcaccagcgtttagcttccgcagcagagttgatgtggataatgtccgggcgccgaggttgtacgcgaacgacaccagcgcatcaaactggccttgcgtcaacttgaccttaaccagtctggacacatcattttcataaccgactaaaccagttttaagcaagcgctcggcagtagcctcgtcaatcatcattccgggcttaactggcttaccgtcaacagagtgggtccagccataaccaatcgtccagggatctccccccgttcccgggtccggataagctttcaggctacaaccttcaaactctttgattagggtaatgcctttttcactgattctcatcattaacccctgcacgttttttgagtgcgctaattgcgatttcgcgcagcttgtccacaccgacaaagccaataattccgccaacgaaaggcgaaatggaaaccggcaggcctaccacatcaagcgcactggtgacacataaggaaagagcgccacacaggacgccctcaagccatttatttttacgggtggcgccgtcgtatatcagtcggccgtaggcaatgagtccggccattaacgccccaagtatctggggccacgcatttttgagtccggtcaaaaccgcagcccagaattcaggagtcttgtcattcattttcataagcctcacctccgatgatttcggatggtaactagagtgagtgaaatggttgggttgcagggtttaatatcttgtaaaacaggattgcctgtggttgcagaatctgaaagtaaaatcacgcagagtacaattttaatggaggtgaggcacaaatactgcaaatttagcttttagcttaattgattgcgtgctgagtgaattctgtttgacaaaaacatgctatttatagaatgttaattccatgtaataaaaaggatgtgtaactcatcatgccagcaggaattaaaccaatatttatcaataatatgatgtcaatatatggattatcccatcctcatgacagcaaggtatttccagaccttccagaacaccaagataatccttcgcaattacgcctccaacatgatggtcttgctaccgatgataaagccaggctggaaccaatgtgtcttgctgaataccttatctctggaccaggaggaatggaccctgatatcgaaattgatgatgatacctatgatgaatgccgtgaggtgctatcacgcatacttgaagatgcatacactcaaagcgggacattccgcagactgatgaattatgcctacgaccaggaattgcatgatgtagaacaacgctggttgctgggagccggagaaaactttggtactaccgtaactgatgaagacctggagagttcagaaggcagaaaagtgattgccctcaacctggatgatacagacgatgattcaataccagagtgttatgaaagtaatgatggcccacaaccatttgatacaacacgctcatttattcatgaagtagtacacgcgttgactcaccttcaggacaaagaagataacaattcaagaggcccggtagtcgagtataccaatatcattttaaaagagatgggtcacacatcaccaccaagaatcgcctacgaatctagtaattgacactcatcaaaaaatgcaaaatcccacgatgctacaacacagtaaccagttcaggtcagcagtccatagacactggctcctgtcaggatgccacctgctaacccagtaccggaaatcggatcggacattcatccccctctggttgtgtgggtcctctcagttatgaggggaaataaaaaaggccgccgaatggcagcctcaaatggaatatgtattaaattggaggttctaacggtcccgccagaatctcagcctctccgttgtgacaaatgtcatcgccctgcgtcagatgccagacaccaataatagtctgaccagtttccaggtcctcggttacgccgtgggtgtagtaagcaacctgaaccctgccgttgtgctgtatccagtagaagccttctttcattctaatctctcctcttcttaagaggagtttagctattgggattgcaggttggcgttagaaatactaaatcatcaatgaagtatttctctggtccgccatcgaggattcgaaccccgaaccacagaggtagaagctccgtgctctttccagttgagctaatggcggaaaaaattgaccagtgaagtccactggtcatgggtcatgcagttgtctctgcgaaacgggtgtatccccacccagtgttttcagtatcgagagcattatcaaatgccatattaactatagcatcgcagaaaaaagtcatactgataattcccaatgacgcacttctgaaaggctctatggttgtattgcgttgtacatagcgcaaaaaataccgattggcagacttagaaatggaaaaccccgcacgatggcgaggcttgaatttgtttggtcgacgattgaagctatggcgacgatatcagatttacataaaatatagccgttttaatccagttttgcaatcaccacgtcgccagcttctcagcaagcaaatcccttttaatgactatccagccgctatcgcgtaatccgctcaatatctgctctacttttccaacgaacatgtctggaccaacctgccgaatgtctttgacgttaccatcgcggatcttaatcagaaggtcgatgttaagcatgtcgacggcaggctgaacctggcgtgttggcgatggtagtgtctgactgaaatagcaatcctccagtttttcgaacacctcccaagcctgatctgtttcgagcatcttggcgtggcgggcagcgccgcgttctgtccagaggattagggaacgggcatttttaccaactaacccgattgtttcgggtctgttcttgaactcgcgtaattcgtttttttcaattttaaaaaaatgctttcctacaacgaatcgcgtggtgttgttcagaaagttatcagaaatgtttttgatttttgtgccgtataagtgcgccaaaagttcggtagtaataacgggaatttggttatgggtaatcggggaaagagtttcgacagagatttgagtggtcataatgacgccctccggtgattgttttgtttatcaccaccgccgacgccaatcggattgggtggtgagacgtacagggttggcgtaaccggatcaccgaccggcgagcctttcggctcccccatacgccccaccataattcaaatgcgcgtatacaaacgacaataaaaaacacgctcgcggcgtgtctctgtcgcggtgaaattccgggacgccaatcccgacgccagattttgctggcgtactgggaatatagccccggataactgtttgtgtcaattaagtgcgtataggttgaaagccacctgttccgaacgcgactccgatacactcaaaagagacgcctgatcaagacgcagaaatatcgcgcgcatggtcagccagtgtctggtgaaggtttctgaccagttcttttcgctaacgcctaccagtcccgctaactctttatattgataaacctcacgcccggctaattcagatttgacatcctgtgccgccagccagattaatgcccggagtcgttcctgtgttttaccggccatcttctttccgtcgagttgcgccgcaaacgcactccagccccactgtgttatttcgacctggtgttcccagcaggtattctcactgtaattccacaacaaccacgccttgtagtgttcatcgagtgaaagaaccgcccggcgccatgaggcagtggaatattccacaggcttcaccagcgggatagcgcttcctttcgccagcgactgcttgccggggattggcgggttatttaacgttatccagctttctgtttcctcgtcccagatacgctgtttttttcggggatagtttttcgtgtcgaattgcgcgttctccagccaggccaaaagctgccctttagtctccccgcttaaatcggctgtcgctaccattagctgctcacgtacatactggaggtattgagtgttcattgagtaaatcctgtgaactgataaatacgaacaaaattgcgcaggatgcggtagtcaaccaacaccgaccccggacggcggtatatgcggaggcgctgccagcgcatgcggagtatctcgatcagttctggtttcatgcggcctccagcttttttagcgcacgcagatccgcctgagccgcgagcctgatttccttcagctcctcgaccgtccagcggtgcggggtgttattgttctcgagtgccagcaccgccgcctcaccgtaacgctcaaccagcgcggtacgatatgcttcgatgttccctgatttgtagacgttgcagacatcacactgaagatggatgttgaagcgagtaaagcgcagatgcccggcggcggccgtactcctgtaatggcctgcatgccatgcgaacgccgtcttcgttccacaggagatgcaaccgagtccttctgccagttcggtttcacggcaaatgtcatttacggcgcgctgcgtcaagtcaatccagtgcttcagcggcttaaccgcggctttccgctggcgccaggcggcgcgttcttttttctcagcggcgcgctgaagggattgcgccttacgttgcgcggcttcgcgagcttttctggtttgttctttgccgacggcgctggcacactggtacgagcaaacgatctgcccctcgcgtatcgggtgaaaccactggcggcattctttgtttgcgcacttacggcgcggtaatttagccatgctcacccccagaccttttggcgtaaggattttggcgtccgcacccggtgtgcatattcaggtaatttcgcgctgacagtccaggtaatgaagtcagggttcaggctctttcctgtccttatgccccgcttctgataatccgatatcagcgtgtcggcctgctcggttgtgcagtcatgatgatggaaccaggagtatttcatcgccatcaccccgcccagctcatgagctgggcggcggcgttctcggcctcgcgctgagtacggaatgtacgtgataaaatccagcgccagagaacatcaagcgcggatttatacaactgctgaaattcgacctcatccatgctggaaaaagcgatgctgcggggatgtttgcgaagggtgccgtccggtaactggatggcgtcatagtgaccagcctcaaccgtcacccatgcgcggtaggcatcgaatgatttacacaggctaatcccgtttgttacccggcggtttgcaatctgttccagatactgttcagccgcatccagtaatgcgctttcattcccgccatatgcagcgagaaactttgcataaccgtttaccagtttgcgctcattggcagaaatggcgccgccggtaggttcccagtattcaaacccaagattaagcaacgcgaaaaagcggcgatggaatgcaggattcctcacctgacggaactcagccaccagcacggcgccgagtttgatttttgattgcagaatatcactggtctccggcgttgcggggatcagaattccagatgactgcttgatgagttgtaattcgtgcgccatggtattctccgtggcgcagaaggttaacggttgttcaggccgttgatttcatattatcagaaggtggtgttacccggtagccgagacgacgaataaaatgcataaaaccgttgggagtaaaaacttcttcatcatccagcaaaggacgcatagataccatgccatttacacgatagataagatgcctgcctgatgatggaaagctaaacaccacgcagccatcagatcttcttacaatgtcataccagctatcttctgacttttgcaaagctgaattactcaatttttgttctcccttcaggcgatgtacagacgcggttaaaaattgtcggcagcagcatcaaagggatacgcaaattgcggtattctgaaaaatgcgcgccagcattaagcgcaatgttaataaaaccagtcgtcagcgctttcccacgtttcctgcaggatgctctgtatacgttttttatcgccatcagcagcaccgacgatactcagaccatcctgactgcctcgacggatggttaagttgcagttttcatactgattctggagacgggtaattaattctttttcaagtgcaggaacggcaccttccggaagctgttttgtccggctgataacaagttcaattctcataattccctctacatttaactactgtatataaacacagtatacctgttagaaagaatattcaagaggtgaatagcactttttgcaaaagctagcatgttgtttcatatcagattttaggcggaaaaacccgccgaagcgggttaaattgtctaaagtttttagactgcaatttcattcggctggcaaagctctggcaagtttgcccttactggcgtctcagcatagagaagctacataacctgctaggagggcttaaacgccatttttgtgctccccattttcagttttccttgccgatgaagctcatttagcagccaaaaagcgcccaagttagagatgcaaaacgccatagcaaccaacttacaaattcgcctccgattatcaggaaagtccttaggaatatcattcataaaggcgatagaacttgctcccaaattagtgatggatgttattagggtgctgtcaattagtgaggcatggttaatatcatcaacggggacactcattatcaaggagtcaatacgctccgcatcttcatcggttattatatactcgattttatgggcatacttattacgaatattgttcatttccgtgaggcatttagccaatgaaacaggaagaccaagtgcgacggcggttttaatcttaggcataaagtatttgtcaacatctacaaacttttcggttccttctcgacggagattttcgattactattgaaagaaagttttcatgtataagattgagtttgattaatgcggccgattcatcaacaaattcagtaatgggaacatacttctgaggatcaagaaagtagcccaaattatggtcgatcgacgttcctgttgactgttcaactctagagtatttcattgaatgctcctgtgatttattgcattagccttaaaaagacattactttcatcattataaagaaatgatataaccaaaatcttaatatgctttgatttagatttggttttattttgttatccatttgctaagcatggcagcgcgacaggcgttccaaccctccacaaatccgcactcatgcattcctataattccgtccgccgtgatttcctccggcactaccggcgctgggtgttttttgatgtgcaagcgaggctcaccatctttcggctcaggccactggcgggacttgtttatctccagcttttccaccatcgcccgggtaatctgtttgtcagtaataccagcacggcgctgcgcatcccataacaggaattgcatatcagccaattcgctgaggtcgccaggttctgcggcagtttccaatgcctcttttgagagatgtttcagcggccctactggaccgacatcgccgaacgtcttatctgaccactcggcgtgctcgcggcgaatacgttcgcgttctgacgctggctgggcggagtagaaatacggtctgatagtccactttttattccagaaatctcgcgttttctcagcttcctcaagcgttgcaacactacagccaacctttccgcactctttgatgacgtggtatccggctggctcttggtatttcagccccacattctccgctaccagcgccgcgcatctggcttccagtgccgctatggtagttacgtgttcagcattacgttctgcaagctgattcatggttaaaccatcagttattccacgttctttcatttggttgctcctgttaaatcagaccggcgtctttgcgttgtttgtatttcgccattaacaactcggctggcgttggaccgcgatcccgcgacggcgcggataaagcgcgacaaacaggcggtatgggtttacctgcaagagctcgcttttcccagtcatgcaggatgtcgccagcggcccggataagttccttttcacttaattgcccctcagttccacggcggcgcagctccaggcagacgtggtaatacagcggatttttatctctccaggggaactgctcactggtcggataacggaaaacaagcttccgccaacgccagtattcgcccatgatgtcgtcaacactgaccccgagtgctccactcccctcacggcaccacgaaataaactgacctggcgacggccagaatggagactggctggaacgggctttctgcattccggcggatagctgcttgcgggtgcggatgccattttctgaaaatgccgctatccactgctgcttagctactcgctcgtcagcatcggagcggagattggtttgcgtcgcggccgggaaaatctgcttcagttgcatgaacagcgcgtcaacaaggcgctcagcgtctgaattcacaacccggccatgctcagggttgcccccggctatgcttgccatcgctgcgccatcccgattgtttattgcgcggtagagttcaggtttcataggaaatccctccatgcatccgggctgttccagtggatactttcctgatcggtatctctgctgcgcttcgcctgtccgtcaggttcgaacagaccctgccagccattcgcaatactgcggttaataatttcttcaggtgtgtatccgttcagcctgcagcggtcaagcaggttgatagcctgcgtcacggtctgctgagacttgatcggctttttcaggtcacggcggtattcaacccatgaagaccagatgatcgaagacagccagtcaggcaactgaacacttgatgcatcgaacgaaaccgcccgggggggtttagggggtttattactattgtctttactgtcttttgtaatagtgtcttttgtgtttacctgatttgggtaatagccgttacctgattcgggtaaacttttcttacctgattcgggtaaacttttcttacctgattcgggtaaacttttcttacctgattcgggtaaatttaccttttccaggtaaggttttttttctgtaccttttacaggtaaagatgaccattcgctgaccgttttattaatcccgataacacgaccggtttgagttaatatcccccgcttaaccagggcgctttttgcagatgagcacttatgagggagaatgccggtcagctccgagagctgctcgttactgacccagtcagatttcttattgaagccgtatgttttgcgcatgacagccatgaacaccaaaagctgatgctgcgacaaacctgcatgcattacagcctcaaggatctcattggcgatgcgcgtaaacccatcatcgagatctgccacgcgcggctccttatgtgccacgtcaggcacaggaaaattgattacttcagcagtgtttgccataattactcctgtgaattgatccagttaattccaccagaaagccgttggtgacccctcaccgcggctttcgcctttttggttgctaccattttcagtcccaccccagcgcatccggcctggctcgttcagcctttagcccggcatcagcgagaatctctacggctgtgagatagtttctggataccagtaccgcctccggtggcgcggcctgaattccaagaaaagccagctctttcgccatgttgcagaaatatccctcagctttacgtctgctgactgtcgactcgctgatgcccatatgctcggcgtaagatttctgacctaccgatgcaagccggttgagcaggacgctctctatttcaatcgggttgatttctggtgggtctaactttcgtgcaattgcgttctccatgggtaaatatcctctatggttgtttggctgatgcctcttggcttggtaatccatctgttgggtttgggtagagatcagggcgcagttcgtgtggggtaacaccagtagcgctgtaaattggaagtactcgatcggcaggaaccactccttgataacgattccgccaatgactgatggtcattgcgcttacttccagtagttcagcaagccgggttgcggttcctgctctggtaatggctttatcaattgctttcatatttgactccagtggcaacagccaaattaaacaaaatgtttatcataatgtcaacattttgaatattgagctaataaacttttggtttagaattgtgttatgaaagaaaaaactcatcagattaatcacccacaagtgcagaggctcaacgagatcctcgaacttaaaaagttgaccaagtcggacatggctcgcatttgcggggtcagtgctcagtcggtcaataactggtttgtgcgcggtacaattgggaaaagctcggcgataaaactggcagacgcgcttggggtgagtcttgagtgggttcttggccaagaggtcgacgagagggacggtttaaaggccgacgaacggagactgctcgaactatatcgccagcttccagatgacgaggaaaagcagaattttcttcgggtattatcgcttcgtctcaaggaactggatgccatgtacgagaagtacatgaagggaaggattcgaacgcgcgaagattaagataaaagctcggagtaattatcaaaatgactcattctcaacatagcaaggaataattatgccagcatcggtaattagctttattaatatgaaaggcggggtaggaaaaacaactctatgtgttggcattgctgagttcatggctaactatcttggtaaaagagttttagttattgatgttgatcctcaattcaatgcaactcaatcactcctaggtcattatggtcgtgtcgatgaatatcttgatcaacttcaaacaaataaaatcacaatacgtcgaattttcgaagttccaacatccattatggatacggctcaagccattagacctgttgatgttataactaaagtttctgataacctcgacgtcatcttaggtgatattaatataatctttgacacatctcaggagtctgtaagaatattcaaaatcaagaggttcatcgatgataacaacctccgtgaccaatatgattatattttcctagatagccctcctacaatatcaattttcactgatgcttcacttgttgcttcagatttttatgtcgttccggtaaaaattgatcactactccattttaggagcaactagtctggtcagtgtggtgcgaaatgtaagacacaatcataatccgaatattagacacttaggattcgtttacaccaatactgatgatgaattgacattaaaaacaagcaagataaaagataattttgaagaaaaattcagtgaattttacttctttgaacataagttatcatacgtacgagatttaatggttgggcagcagggtaacattccctcttgctatacaaagtcaagaagtgatataagcgcaatatcaacagaattcgcattaagagttgaccaactaatggtgagtgaaaatggataaagaacaatacaacactctattcaggtttgcccatggcggagtaacaaaagaatccgcgataggtctttttgtgaccatcttacttgataaagatttgttaaaatcaaatcatgatgtaaaagattttgttgaaagtgtcttttccatagccctattaccatacgttgttcgctcaagaacacttatttgcgcaaaaatatgcagatttttagtaagcagagaaagaaaagaaatcaataactatggtgttatggctcgttcatatttcgaaaatattttttctaaagaagaagacctgcaaggccataaaaaaagaaatacagcactttctaatatggatctgtgggtatctaggatgcttaagaaaggcgataaataatgctttctaacgacccatacggcaacagagcagaaactgacaggtttcgccaagaggcaactaagtatctgagtgatgagtcagatataaataccttggtaagtgttttcaaacacgttagaatttatagcatgattattgaaatgaataccaatctatcacacaaatcacatgtgaagggtataatttatgattctttaaattccatcgttgcaatattaaataaaagagaacgatatttacatttaaatcttcgttctatgattgagcatatagcaagaatagctttgaataaaacttattctggtggtgatttcgatggaacggtacgacgacgagattttgattaccttaaatctaatagaagaaatgaaaattggaactatctgcacaatgtttatataaacgcttgtcattatgtgcatttttcaccgcaagcaaatattaacacgtcagcaacttttttgcagttgcttgtaaacgactgccattcatcgcaaaagaatcttattcgtaatctacatagattaacaagttccgtaatggaaacttacattacttattttcactatgaagttgcgagtacattttatagatccatggcagatctgaagtatctgctggggaatagtttatacaccaaatttaaagcgctgaactaacacctctaatttaaccgggcaacaaagacgttttttatccttagcccccttccccaaaactgcaagtgatcccagcctcatggctggtttttttttgtccaaaatcggcataaatcacacctccaaaagtcagattaaacattttgtttattgatttatactcattatgttgacatatgtttaaacattgtgtttaatgaaatcaccaaaacgcaccacgaccacccaggcaggacgcccacgaagtagccgtccggggcatacgaagaccggaatgaggtggaaaagttaacgcgcagaaggtgataaacgttccgctggccggcgataaggcaaacgagggtgagaatgattgatttcgcacgtaaaccagctcgacagcaggccgtcccgctcaaccggattgaggttttaatccgccgcctctgctacctgctggcgcagaaaggagatccggatgcttaaacaatgcggttactgccgcaaatccattgatgaaggcaaagaagtaaaaaacacccttctctatctcaacggctcgcaactggcgcgcaaagaaaaggaatattgttccaggcagtgcgctgaatacgaccagatggcgcacgaaagttaaatagtagttccgaaatatgaaatgaaaaattcgccattaatttggcgtggcttcctacaccctgaatttaagactggagaaattatggaaatcgtaaaaatcgaaatgaacctgaaagcagttaataagagcattgctttattcaattgcgaaaagaaagtctcaggcgttattcactcaaattcaactggcgaaacyactgtgattctcgacggtggatatgtactcggaaagttcgacwgtcctcattgtgctgtaaaagccatttcgctgctcacagtcaaggtaagtgatggagaacaagcagggtttggtaattaccgaagttacaagcttgattactcagaaaaattttatcagaccatccattaagaaaacgcccaccgaagcgggcgtgccctgtccggtccaaccgaccaaagcgaaccggacctaacaaccagatatatcggggtgctgttaaggcacctccattctacacgaattgaggacaaaacaatgagtggaactaatcctgtatttttagtccgcaaagcaaagaaatcatcaggccagaaagacgctgtactctggtgcagtgatgattttgaagcggcaaatgcaacactggattatcttctgattaaatccggtgcgaagctgaaagattatttcaaagctgtcgctactaatttccctgtcgttaacgagctgccgccggaaggcgaactgagcctcactttctgcgattactatcaactcgctaaagacaatatgacctggacgcaaatccccggcrtcaccctgccatcatctgaagccgccgccgcggcgcgccagcatatcgtcgatggtgttgataccgaaacaggcgaagtgctggaagaccacaccgaaaattttggtaacgaaagcaacagccctgcccaggcaacagccccagcccccgagctgactgttgtcgcaactatgcctctccgtcaccgcgttcttgctcagtacataggtgaaggtgagtatctttatcacgtcgacgcctcccagaaaaaagaaattctgcgtctcgaaatggacaccgataattcatatgtccagaacctgctgcttgccgccgagaatgttgaagcgttcaagaaagccattgaacatgacattcacaaaatagtgaatgccgttaaaaaaatattccctgtcgatggaaaaactcctgaactggcgactgttatccagttccttaaaacatggttcgagacggagcatatcgatcgcggtttgctcgttaaggagtgggcgaaaggcaaccgtgtatcggctattcaacgcactgaaagcggcgccaacgctggcggtggcaataagactgaccgtaaccctgattacgaacatactctcgatactctggacgtagagattgcaatggccactttgcctatggactttaatatctatgagctacctggcagcgtttaccgtcgcgcaaaagaaatcgtaaagaaaaaggaaagtccgttcaaagaatggtccgcagcacttcgcgcaacgcccggtatcctggattattcccgcgccgctattttcgcgctgatccgaagcgcgcaccctgagttttatcactaccccggacgccttcaggggtatatcaacgccaacttaacggagactgatcacgagaaccccaccgaggaagctctcacggctgcccgacacactccggaaaaagacgcggtagaagaagccaaccgacagcttgccgccgcgcgcggtgaatatgtggaaggcatcagcgacccgaacgacccaaaatgggtgaagaccgggacaagccagccgaccaccgaacctgaactggttaaaaatgttggcaacggtattttcgacgtgtccgctttaatgcagaactcatcaactcatggcacagaaacgaatccggagaccaccagcaatgtgcaggttcaaaaagctgacagtgatgaaaaacaggctggtgatgcggtgcaggcaggcgaaggcgatctgggtactggtaaagaagcagttaccgtagagaaccagtatctggctgagacgcaccagaacaacgattctgtgagccaatctgaacctgaggcgcaacaaaacgtaccggaatcgcaacaagaagagccagaagcagcctggccggaatacttcgagccgggccgctatgaaggtgtaccaaacgaggtttaccacgccgccaacgggatcagctcaactcaggtgaaagatgctcgcgtgtcgctgatgtactttaacgcgcgtcacgtagagaagactatcgtcaaagagcgctctccagtgcttgatatgggcaacctggtacatgttctggctctacagccggaaaacctcgaagcggagttcagcgtagagccggagatccctgagggtgctttcaccaccaccgccaccctgcgcgagttcatcgacgcgcacaacgccagcctgccagcgctgctgagtgctgacgatatcaaagcgctgctggaagagtacaacgccaccctgccgtcgcagatgccgcttggagcttcggtagatgaaacctatgcatcgtatgagcagcttcccgaagaattccagcgcattgaaaacggcaccaaacatacagccacggcgatgaaagcctgcatcaaagagtacaacgccaccctgcccgcgccggttaaaaccagcggcagccgtgacgcgctgctggagcaactggcaataatcaaccctgacctggtcgctcaggaagcgcaaaaatcgtcgccgttgaaagtctctggcacgaaggccgatctgattcaggccgtgaaatcagtcaacccggcagtggtattcgccgacgaattgctggatgcgtggcgggagaacaccgaagggaaagtgctggtcacccgccaacagctcagcaccgcgctgaacattcagaaagccctgctggagcacccgaccgccggcaaattgctgactcacccaagccgcgctgtcgaggttagctattttgggattgatgaggaaaccgggttggaagttcgggtacgccctgaccttgagctcgatatgggcggcctgcgcattggcgccgacctgaaaactatcagcatgtggaacatcaagcaggaaggcctgcgtgcgaagttgcaccgggaaatcatcgatcgggactatcacctgagcgcggccatgtactgcgaaactgcggcgctggaccagtttttctggattttcgtcaacaaagacgagaactaccactgggtcgccatcattgaggcgtctaccgagttgctggaacttggcatgctggaataccgcaaaacaatgcgagagatagcaaacggcttcgacactggtgaatggtcagcgcctatcacagaagactacaccgacgaactgaacgattttgatgtgcgccgccttgaagcgttgcgcgtacaggcataaggggaaaatcatggaaaacacaaatattgttaccactgagcagcaggcaccaaacaccatttctgccagtaacgcaatttttaacgttcaggcactgggtcagttaacagctttcgctaacctgatggcagactcacaggtgacggtaccggcacaccttgcagggaaaccagccgactgtatggctatcgtcatgcaggctatgcaatggggcatgaacccttacgctgtggctcagaaaacacacctggttaacggtgttcttggttacgaggcacaactggtcaacgcagtaatcgcaagctccagtgccattcatggccgttttcattaccgctatgggggtgactgggagcgctgcaccaggacacaggaaatcacacgcgataaaaacggtaaaaatgggaagtacaccgtcactgagcgcgttcgtggctggacggatgaggacgagatcggcctgttcgttcaggttggtgccattctgcgaggtgaatctgaaatcacctggggagaacctctttacctctccggcgttgttacccgcaattctccgctatgggtttcaaaccctaaacagcaaattgcctatctgggcgttaaatattgggctcgcctgtactgcccggaagtgatcctcggcgtgtacagccctgatgaggttgagcaacgagaagaacgcgagattaaccctgctccagtccagcgcatgagcgtacaggaaatcaccagcgaggttagcaccaggaccagcgcgcaggagtcggcagctaacgttgatgctgttgccgacgatcttcgcgaacgcattgatacagcaagttccgttgatcaggcaaaagcaatccgtgcggatatcgaatcacagaaagcgttgctgggtactgcgctgttcaccgaattaaaaaacaaagcagtgaagcgctattaccaggtcgatgcacagaacaaagtcgaggcagtgatcaactcaattccaaaccctggcgaaccggaagccgcagagatgtttgctaaagctgaaagcacgcttggcgctgctaaacgtcatcttggcgacgaactgcacgataagtaccgcgtccccctggacgatatgaaaccggaatacatcggctaattgcatcgggagggggtacgccctcccacctgaggaggttttatgcgcctaataaatcgcagtaagcaatcgccattgggccgtcgcgcatgtgatgttgcactggcggcgcatcatgaaaagttcggcgattacggcagacaaaagcacgttaccaattacaccgttgtagtggatggcgtaaaggtgcctgttgaagtagttaaccgggccaccagctacgtagccaccgcaatgatcggcgtccggaaacttagaaatctgccagcacaggcaaactgaatattagcgatggcccgctgcggggccactggagaaaacgatgagcaaaaaaattagagactttgaattgatgagcacccgcgaaatttgctgccagctcaggatttcttccaggacgctggagcgttaccgtaagcgaccaagcgacaacaacccattcccggagcctgactgttcatatatgggtggctccaacaaatggcttaaaaccaaagtcaatgagtggcaggtcagggaaatgtcacgaccaacacgccgtccaatgtcgcatctgaatctgccccgtgacaacaaaggtcgactcatccggtctgacgtggcgtgaactccagaacatcgggctcgatgatgctcatcagtcgggcccaccatttactataagcttctctcatttcttcgatataggtgtatttgtcgtacaccgaccacactccaggcagtttgtgcccgagcatcatctcagcaatatgtggttcagtcagctcggagaaattcgttcgcgcagttctgcgtagatcatggatcgtaaagtgcggaacctgctcgttataagccttcagcatgaacttaacaaggttgctgctgatgctcatatgaaagccttcgctcatcggcttgtctgcatattttgagaaaacaaaacggcctggcgccagctcaatggctcgttgtatcagcgggagcatttcagggatgatcgggcggattatcggcttcttacttttccgtcccgttttatgattttcccacggtacggtccagacgccctcctcaaaatcgaaatgcgaaacttcagcctgacggagttcaccgaccctgcacgcccatatcagggacaatttataaaggatcttgtttcgctcaataaggcgggaatcctcaatagctcgccagacaatcgcaatttctttgcgatccagtgttctctcccccattttcttctgaataccaaaatcacgaccggacatttcagaaagtgggttaacctcaagcaactggcgcttcactgcccatgagtagcactgccgaccgttactaattactcgccgggtgatctcagtgtatccctgcgccagtcggtccagaactgtaagccagttgtgcagcgtcaactgatgcgccggatacttacccagcttagggaatacatgcagctcaaacgaacgcagtatttgatcggatgtttctttctgaacgcataccatcgcatgccattctctgaaaagttcctcgaatgtgtactggctgttgattttagctttatcgaggctttgcctgatccgcggattttctccccgggcaagaatggcggcccacttagttacctcttcgcgcgcggccttcaacccgaattccgggtaactgccgatcgtcatcttgtcctgcttacccaggaaacggaatcggtagaaaaaagtgacggcgccctttttggaaatgcgcacccacagaccgtcccggtctgccttctcctcaactttatcgcgttcgcgcccgaggcacgactttagataactatctgaaatagccatgatttatccctgcatgtgtccatcagaacggaagattctgtgtccatcataggatatggacgcactggtggacacaaaaaccatgactcatgatgtcgtaggttgactgtacatgcaaccagtatcatttttgtgagcgcttattttgcggggatcttgagaggattttgtcgtaggtttgcggagggtggcggggtatcaattatcgatgtgagcaatgatcgaaaagttacgtatgttcttcatagagataaattattatgccttacgcctggttgaccagactttagaggtcgctgttctgagcttaacgtctgttttaactgaaacgccgcattctacactacaacgctaaggcgaggaaatgttcatagtgtaaggagagcgggaactggaaaacgcctcgcttttttcctgtaaaacaccgcaacgcaggaaaagcgcatgcttatcgggacaacaacccaacgcggcaggtgtaccgttgggcaaaacgtttactggcgcgtttcgattgaggtagtttcgacgcgaacaaggtcaggcgggagggcaacgtttaaaatcaccggctgccaggcgtcgcgctccgccagttttcgggaataaccgcgggcaaccagaaaaccgcccacgccgcccagcacggccccgcttaatgcggcaaggtcagatccaaacagcatctgaaaaagcgccgcacaaagaaatagccccgctaaaggcgacatatagaccagcaacgccgaacctaaaaggcttttttcggcgatgcccaactcgactttctgccccggcgccagcggctccgcgcttggcacaacaatggtatgcgtggtttgcggccctaatttattcagcacgcgactgccgcatcccgcacgggaggcgcagctgctgcatgacgctttaacgtcgcagctcaccaccgcctgaccattctgccaggagacaacggttgcccactctttaatcattgtactgccctgaatttgatactgtcggcaatgcgcttcgccgtttgcggcggaagctcgccgacaatggtgatttccgcgttgtcgcgaacgctgctataaaccgttcggcgcccggtgcgcagcatctgatcgctgctgttttgcgtcgcccggttcacattgacggaaaagctaaacagaccgtcagaataaagccgcgattcgataggcaggttatccatcgtcggcaacggacgacggctgctggaaacttcgctaaagccttgcggcacccaggatggactccagttaaatttcgttttttcgccaccgggaacagaaagcagcggcggcagattcgccttcgccagcgcctgcatgttgctgccgatatcctggctcaccgtgaacgcaataacgcggaactgctccagcgtctcgccatcgcgatccagcagatcaacgcgcatcggcagtttggtgtccatgtccatccagacgatatagctgtaacgcgtaccatcgcgcgccacaacgcggataacttcgcacaatctgtctgcgatacgggtgcgtccgacagaaataaagtcgtagtaaggcgccaggcgcttaaagtcggtgtaaatcagggaaggcagagaatcgacaatataatcaccgttcagggtgaacggctcaaggcccggttcaaaataactgatttcattaccacgctgtacgacctcccggcggggaccgtccaactgtagcaattgcgcaagcgggcgaccatccaggcgtgcgtgtcgataacgcagagattcaacgccttgtttcgtgatgctgacgaatgacagctcgtaattcagtgactgactggcgatgttcatctgctgcaataacgccccggacgcagggtcggccgaggcgtttgctgagaagaacaggctagccgccacaagggacatggcaaaccaaagttgcttcattactgcgattgcgttcctaaagtttggattcctggcacctgtaccgcggcttgctgggtttgcgcctgctcaaactgaagctgttcggagtgcagtcggcgctgcagttcatagtcctgcaacatggcattaatgcgacgacgctgctcctgtacctgctgttgctgactgccgacaggcgctgcttcagaaggcactcccagacttaccgggctggctttccccatcataggcagggtattgaaaaccggcgtttcaggttgttgggatgtttcagattgcccattatagtgctggacaccgacgataactgcaagtgaaacgcacgccgccacgcccatttgggtaagctgcgccgcccacggacgcacttttttccagaacggcattttctgccattgctgcggagcgggttgggcctcagggattaatggcgacacctgacgtactggctcgttttcaatagcggccatcacgcgagcggatatatcgaaatggagaacgtcaggcgtatccccccgcattgaatcgcggatcaggtgataactctcccaggttttctgcatttccgggtcgtgcgtaagcgctttgagcagctcactatccaacgtttcgccatccatcaaagcggaaagtttttctttctgcatgcctaataccttttccagtatcccgctatcgtcaacgcctgataagcggttgaactttattatcaatagcttcccgcgcccggaagatacgtgaacgcaccgtccccaccggacaatccatgatagccgctatctcttcatagctcaggccatccagctcccgtaaggtgattgccatacgtaaatcttccgggagggactcaatagttcggaaaactatctgtctcagttcttctgacaacattaagttctcagggttcgaaatttctttcagcgcgccgccgctttcaaagttttctgcttcaatcgcgtctacatcactggaaggcggacgacgcccctgcgcaaccaggtagttcttcgcggtattgaccgcaatacgatacaaccaggtataaaaagcactatccccccggaaagaatccagcgcgcgataggccttaataaatgattcctgtacgacatcgggaacgtcgcccgatggcacatagcgggaaaccagactcgccactttatgctggtagcgcactaccagtaagttaaaggctttctgatctcccttctggacccgttcaaccaggacctggtccgttaactgctcgctcatccgaggtaatgtctccccaaaccaaatttccacgcgctttcgaaacgccactccataagccgcactatgagcaagcaacaggttagagtgtctatgtttcgtaaagttccgttacgcatttgtttttgtttgtcatgttgtagacaggtcttatcttccattataagtctacagatgctgaacaacgcactatctgtacagaaatgcccatttcgtcgtttgcagagtaacctaacagcatctttatttcactacaaaatccgacgctaacaccctgccctataaaatattttttgccgtttatctctcgccgtatttttattttatgtttaataagcacaacaccagcgaaatcataacgtgctttttagcgccatatagtgctaatctgccgcaaccatgtttagtaaattaaacaagaaccatgatgacaactcctgaactgtcctgtgatgtgttaattatcggcagcggcgcggccggactctcgctggcgctgcgtctggctgaaaagcataaggttatcgtcctgagtaaagggccggtgagcgagggctccacgttttatgcgcagggcggtattgccgccgtgtttgatgaaaccgacagtattgcgtcgcatgtcgaagatacgctgattgccggcgccggaatttgcgatcgccacgcggtggagtttgtcgccagcaacgcccgtacctgcgtgcagtggcttatcgatcagggcgtcctgtttgatacgcatgtccagccaaacggcaaggagagctatcatctcacgcgtgaaggcggccatagtcatcgccgtatccttcatgccgccgacgctaccggaaaggaagtcgaaaccacgttggtcagtcgggcgcaaaatcatcctaatattcaggtgctggaacgcagcaacgccgttgatttaattatctccgataaaatgggtctgccggggcctcgccgggtcgtcggcgcctggatctggaatcgcaataaagagtgggttgaaacctgtcatgcgaagtcggtggtgctggcgaccggcggcgcctcaaaggtttatcaatataccactaacccggatatttcctccggtgacggtatcgcgatggcctggcgcgcaggctgtcgggtcgctaatctggaatttaaccagtttcatcccaccgccctttatcacccgcaggcgcgtaattttctccttaccgaagcgctgcgtggcgaaggcgcataccttaaacgtccggacggttcacggtttatgccggacgttgacgaacgcggggaactggcgccgcgcgatattgtcgcccgcgctattgaccatgagatgaaacaactcggcgcagactgtatgtttctcgatatcagccacaagcctgacgattttgtccgccagcacttcccgatgatctatgcgaaactgcttgatttggggatggatttaaccaaagaaccgattcccgttgttcctgccgcacactatacctgcggcggcgtggtcgtcgatgattatggtcgtaccgatgtagacggcttatatgccattggcgaagtcagttacaccggcctgcacggcgctaaccgtatggcgtccaactcgttgctggaatgcttagtgtacggctggtccgcagcaatggatatcgacaggcgaatgccttctgtccacagcgttgacgcccttcccgcctgggatgaaagccgcgtggaaaacgccgatgagcgggtggtgattcagcataactggcatgaactgcgcctgctgatgtgggactatgtgggcattgtgcgcacgacgaaacggctggagcgcgccctacggcgtattaccatgttgcaacaagagattgacgaatattacgccaactttcgcgtctcgaataatttactggagctgcgcaatctggtgcaagtggccgaactgattgtgcgttgtgcgatgatgcgtaaagagagtcgggggctgcactttacgctggattatccgcaacaactggctgaatcaggcccatcgatcctttcgccgttaacgcctcacataaatagataaaatgcctgggtcagcgccgtataactttcagaataatgctggtctgacccgcgaattactaatctgtcgctaaagcactccccggcttgcggggagaatgcgagcaaaacccggtgcggcaagcgcgcttcgttttccgcaacgtcagtacgtagccgcaaatgccatcccatgttgagcgcttgctgcgtaaaagcgttacctatttgttccggcaagactacgcaaaaaaagccatcttcggtaatacaatccgccgcaatagccaataacgtctggtgatccagcgtagcggtgtaacgcgcctgctcccgctgcggcgtggcgcattccacaccgggttcgtaataaggcgggttgctgataataagatcaaagcgtaccgtctggcgaggcgcccaacgctgaatatcgtcagtatgcaccgttattcgatgcggccagggagagtgagcaacgttttcctgcgcttgcatggcagccccggcatccagttccacggcgtcaataggcacattgtcatccgtccgctgcgccagcattaacgccagcagaccgcttccagtaccgatatccagaattcgctttacatccgcgaccggcgcccacgccccgagtaaaataccgtcagttcccactttcatcgcacaccgatcgtgtgcgacaaaaaactgtttaaacgtaaatccgttacgacgaagaacggagccagactgagacatgtaaaaacaaccttgcaaaaaaacggcgacagcgccgggtgaaaacaatacctgagaagggatatccatacaaacagatgaagattgcggccgtaacgtctataatcagcgccccacacagaggtagaacatgactgtaacgactttttccgaacttgaactcgacgaaagcctgctggatgccctccaggataaaggtttcactcgcccgaccgccattcaggctgccgccattccgcctgcgctcgatggccgtgatgtactcggttctgcgccgacaggcaccggtaaaacggcggcatatctgctgccggcgttgcagcacctgctcgactttccgcgtaaaaaatcggggccgccgcgcattctgatcctgacgccaacccgcgaactggcaatgcaggttgccgatcacgctcgtgaactggctaagcatactcatctggatatcgccacgattaccggcggcgtggcctatatgaaccatgctgaagtgtttagcgaaaaccaggatatcgtggtcgccacgacgggccgtctgctgcaatatataaaagaagagaactttgactgccgggcggttgaaacactgatccttgacgaagctgaccggatgctcgacatgggcttcgctcaggacattgaacatatcgctggtgagacccgctggcgtaaacaaacgatgctgttctccgccacgctggaaggcgatgcgattaaagattttgccgagcgcctgctggaagacccggttgaggtttctgccaatccgtcaacccgcgagcgtaagaaaattcaccagtggtactaccgtgccgacaatttcgaacataaagttgcgctgttgaagcacctgctaaaacaagacgatgcaacccgttctatcgtgtttgtacgtaaacgtgaacgcgtccatgaattggctgaaacactgcgtctggcagggatcaacaattgctatcttgaaggtgagatggcgcagatcaaacgtaacgaaggtattaagcgtctcaccgacggtcgcgttaacgtgctggtcgcgaccgacgtcgcggcacgcgggattgatattcctgacgtcagccacgtcattaacttcgacatgccgcgcagtggcgatacctatctgcatcgcattggtcgtacaggccgtgctggccgcaaaggcactgcaatctcgctggtagaagcccacgaccatctgttgctgctgaaaatcggtcgctacatcgaagagccgctaaaagcgcgcgtcattgatgagcttcgcccgaccacgcgtgcgcctagcgaaaagttgaccggcaaaccgtcgaaaaaagtgctggcgaaacgcgccgagaagaaaaaagagaaagaaaaagagaagccgcgcgtgaagaaacgtcaccgcgatacaaaaaatatcggtaagcgccgcaagccaagcggtacgaaaatgcaggagcaatccagcgaagagtgatgataatgccgggttcgttaacccggcatttttttatcttccacggtaaaacacgcctccatacactgcataaatatctgcattgccgggctgaccgctttcccggcatgatgggcgcacagcgccatgatcgatagcgacggcgcgccaaacggcagctctttcaactgaccggtactaagttctcgttcaacggcaaaacgtggtaaaaagctgatgcccaggttagcagccacacactgtttaatgctttcaatactccacagttcaatggtgttttccagcgtaatccgcctctgccgtagcgtactttcaaacagctggcggaagacacattgcggttcattgatgatgaagctacagggaatatgctgatctggctgcgtaaaatcagcatcctgtagcagtggagaggccaccagcgccagcgactgcttccccaattgctgcatcgtgagcgcgtcatcattacctacgcgataaaaaacgcccagatcgacctcgtcattcagcaacgcatcacgtatcacatagcaattcagcgactgtagcgacaatctgacattcggcgctcgcagcttaaaacgttgtaaaacctgcggcattttgtacgccagtaaggtttcacctgtcgccacgcgcagctctccgccgggttccgcatcctgtcttgcggcttcacgaatcgactccatcacacgcgtcagttcatggatatgcggcatcagctttttcccctcattggtcaggcacattcggcgccctattttctcgaacagttgcagggaaaactcacgttcaagctgttgaatatgaaaagttaccgtcgactgagtgcagcacagcttttgcgaagcccgcagaaacgagccctcttccactaccgttttcagcgtaataaaccgacgcagatccataaccaccaacctatcgaaaatctcgaattcagaattaaaaaacattcatttttttaaatatttcatatcgggtactgtctgctaaaacagaggagatgacaagtgacaccgatgcttttaagcgctttctggacttatacattaatcaccgcccttacccccggccctaacaatattctcgcgcttagcgcagcaactgcacatggttttcggcagagtattcgtgtactggcaggtatgagtctgggatttttggtcgtcatgctgctgtgcgccgggatcgcgttttcccttgcggttatcgatccggcaatcattcatttgctcagttgggtgggggctgcgtatatcctgtggctggcgtggaaaattgctaccagtccagcggcggatgagaacgccagaccaaaaccggttggcttttgggtaagctttggtctgcagtttgtgaacgtcaaaattattctgtacggcattaccgctctgtctacatttgttttaccgcaaacgcaggcgctgaattgggtcatcggcgtcagtatattgctggcattgatcggcacgttcggtaatgtgtgttgggcgctggcgggacatctgtttcagcgggcgtttcgccattatggtcgccagttaaatatcattctggcgttactgctggtgtactgcgcggtgcggattttttactgacccaaataaaacaaaagcggaaaaggcccggcctcttccgcttgttattaccggataagccttacaggctttcggtaaaggtacgagcgataacgtcgcgctgctgttccggcgtcagggagttaaaacgcaccgcataaccagaaacacgaatagtcagttgcgggtatttttccggatgcttaaccgcatcttccagagtttcacgacgcagaacgttaacgttcagatgctgaccgccttcaacgcgtacttccggtttaacttccatcggaatttcacggtattcaatctcgcccagtttgctgacagccacaacttcatcttcagcaaagccggattttgcaacgatgcagcgcgcttcgcctttttcgctgtccagcagccagaaggaattcagcaggtcgtcgttagcggctttagtaatctggatacctgtaatcatgtgatgcctccccaggcaaaattatttgatttcggtcggcctaatcccggccaattggtaaaaccattgttgcttgagtgtatatatacccttcgatcacccttcattctttgatttaaatcaataaaaaccacaccacaaaaagggtgatgaagggaatttattgttttacatcaacttacaccattcagacctataaactttttacataaattttcaactatcttttgtaggtaaccgtttttgtagcacgcaggattttgcactgcagaaagaagcagttaagctaagggaactggaaattcgcaggagagcgagatggcgactgagttaacctggcacgatgtgctggctgatgagaaacagcaaccttactttatcaatacgcttcacactgttgctggcgagcgtcagtcgggtatcacggtctacccgccgcaaaaagatgtgtttaacgcctttcgctttacggaactgggcgacgttaaggtggtgatcctgggacaagatccttaccacggccccggccaggcacatggtctggcgttttccgtgcgtcctgggatcgctcccccgccatcattagtgaatatgtacaaagagctggaagcctccattcccggctttgttcgccccgcgcacggttatctggaaagctgggcgcgccagggcgtactgttactgaatacggtgctcacggtacgggcaggccaggcgcactctcatgccagcctggggtgggaaacctttacggataaagtgataagcctgattaaccaacaccgcgaaggggttgtcttcctgctgtggggctcgcacgcccagaagaaaggcgcgattattgatccacagcgccaccatattctgaaagctccgcatccctcgccactctctgcgcaccgcggattttttggctgtaaccattttgcgctaacgaaccaatggctggaacaacacggcgagaaaactatcgactggacgccagtattaccggctgagagtgaataacgttggcgactcgccgttttatcgcccggataacggcgcgaaagcgccttgtctgaccgggcggtagaaagtacatcattggcccggcgcgcgttgcgtcaccgggctgcagcccttacgctttattctgtcgccaccactcggcgagcagtacgcctgtcgcaaccgacacattcaggctttccacgttcccggtgccgttaattttcacgcacagatcgtcgggttcgcgcgccgcttccggcaggtagtcatattcacggcctaagaccagcaccatcttttccggcagggtcgtactaaagagcgcctgaccgcgatcgctggacgtcgtcaccacggtgtaccccgcctgacgaaaatcatccagtacgtcaacaatgctttcaccagtgatcggctggacatgctccgccccgccttccgcggtacgaatcgccgcgccggactccagcaacgccgcatcctgtaccaccacgcctttcacgccgaagtgcgcgcagctacgcatcatgccgcccagattatgcgggttagcgacatcttccaacgccagcacgcagtcttgatccgccgcctgctttacccattgcttaacggtcgtaccgttacgctttttaatcaggaaacacacgccaccgtggtgctcagtcccggaagcttttgccagttcggcttcatccaccacatggtaggctttacgattcgccgccatccagcgcagcgcctctttaaaacgcggcgttacgctttggataaaccatgcgcgcacgatggcgtcaggacggctctggaatagcgcctggcaggcgttttcaccgtagacgcgcgtctcttccgcacgctggcgacgcaaaacttcagggtcaataaaacttttaccgctaataccaccatgatcgactttctcaggcgtttcatcgcctggcgcgcgggacacggtgcgccacggcgaagtttcatgtttacggtcacggctctgattatttcgctcatcacgggcggggcgacgtccaccgtcagtgcgagactttgctgggcggcctccccctttcccggtacgcgggttatgggtgcgtttatcagagtcatcatcactacggacatacatcactttgactttgccgcttttgttttttaattcatcgttcatgcttttctccaccagcgctgcgcgaagcgcgaagattacccgatgtgcatccggttagccatgatttcgtttaaaagcttgcgactattgtactcattgaataaaacacattgttgtttagcacagactcctcgataatatgtaacattatagaaacatcccgcgcgtagcgggacgtcttccgacgtattcagaggttagctatgaacaccgtttgtacccattgtcaggccattaaccgcatccccgacgatcggcttcaggatgcggcaaaatgtggacgctgcggtcatgagttgtttgacggagaagtcattaatgcgaccggcgaaacgctggacaaactgttgaaggacgatcttccagtggtaatcgacttttgggccccctggtgcggcccttgccgtaactttgcgccaatcttcgaggatgtcgcagaagagcgcagcggtaaagtccgtttcgtcaaagtgaataccgaggcggaacgggaactcagcgcccgtttcggtatccgcagcatcccgacgattatgatttttaaacatggacaggtggtcgatatgcttaatggcgcagtgcctaaagcgcctttcgacagctggctgaacgaagcgctgtaaacgccacggggcgcatcttgtgccccgttttcacctctgccacaatagcgtttttctccgcaaacgctttctatgaccaataacgctgtccttcagttacgcgccgaacggcttgcgcgcgctactcgcccttttcttgccagaggcaatcgggttcgccgctgtcaacgctgcctgctgccgctaaaatcttgcctgtgtgatacgttaacgccttctcaggcgaaaagccgtttttgtctggtcatgtttgacactgaaccgatgaaacccagcaataccggccggctgatagccgatattttgccggataccgcggcgtttcagtggtcgcgtaccgagccgccgcaggcgttgctggagctggtacagcatccggattatcaaccgatagtggtctttcctgcgtcctacgccggcgaagcgcgcgaggtcatttccaccccgcccgccgggaaaccgccgctgtttattatgctggacggcacctggcccgaagcacgtaaaatgtttcgtaaatgcccttatctggatcatctgccggtcatttccgtcgatttatcgcgtctttcagcttatcgtctgcgtgaaatccatgccgaagggcaatattgtaccgccgaagtcgccatagcgttgttagatctggcgggagataccgaggcggcaaccagtttaggtgaacatttcacccgtttcaaaacgcgctatctggcaggaaaaacgcaacatccgggaaacgtcacagcataaaatagcgaaagcgtttaaaattatccggtcacttctgtgtaagggaaaccggtatgagccagcaaggactggaagcgctactgcgaccaaaatcgatcgcggtgattggcgcatcaatgaagccccaccgcgcgggttacctgatgatgcgtaacttgttggcgggcggattcaatggccccgtccttcccgtgacgcccgcctggaaagccgttttaggcgtcatggcctggccggatatcgccagtcttcctttcacccccgatctggctattttatgcactaacgccagccgtaacctggcgttactggacgcgcttggcgcgaaagggtgtaaaacgtgcattatcctttctgctcccacgtcgcaacatgaagaacttcttgcctgtgcccggcattataaaatgcgtctgctgggtccaaacagtcttgggctcctcgcgccgtggcaagggctgaatgccagcttttctcccgtcccgattaaacagggcaagctcgcttttatttcccagtctgccgccgtgtccaatactattcttgactgggcgcaacagcgtgaaatgggcttttcctactttatcgcgctgggcgatagcctggatattgatgtcgatgaactactggactatctggcgcgcgacagcaagaccagcgcgattttgctctatctggaacagttaagcgacgcccgccgttttgtttccgccgcccgtagcgcttcacgtaacaaaccgattctggtgattaaaagcggccgaagcccggcagcccagcgtttacttaataccagcgcgggaatggaccctgcgtgggatgcggccatccagcgcgcaggcctgctgcgagtccaggatacgcacgagcttttttccgccgtcgaaacactgagccatatgcgtccgctacgcggcgacagactgatgatcatcagcaatggcgccgcgcctgccgcgctggcgttagatgagttgtggtcgcgtaacggcaagctggcgacgttgagcgaagagacctgcctgcaactacggcaggcgcttcccgcgcacatagatattgccaatccgctggatctgtgtgatgacgccagcagcgaacattacgtcaaaacgctggatatcctgctcgccagtcaggattttgacgcgcttatggttatccactctcccagcgctgccgcgccgggtacagaaagcgcccatgctctgatcgagacgattaagcgccaccccagaggcaagtttgttacgctgctgacaaactggtgcggcgagttctcgtctcaggaggcaagacggctattcagcgaagccggattaccaacctaccgtacgccggaaggcacgattaccgcgtttatgcatatggtggaataccggcgtaaccagaagcaactgcgggaaacgccagcgttgccgagtaacctgacgtccaataccgctgaggcgcataatctgttacagcgggcgattgcggaaggcgccgcctcactggatacccatgaagtacagccgattttacacgcctatgggctgcacacgctcccaacctggattgccagcgacagcgctgaagcggtgcatattgccgaacagataggctatccggtagctctcaagctgcgctcgcccgacattccgcataaatctgaagttcagggggtcatgctttacctgcggaccgcaagcgaggtacaacaggccgcgaacgctatttttgatcgtgtaaagatggcctggccgcaagcgcggattcacggtttgctggtacaaagcatggctaaccgcgccggcgcgcaggagcttcgtgtggtggtcgagcacgatccggtgtttggtcctttgattatgttgggtgaaggcggcgtagagtggcgtccggaagagcaggctgtcgtcgcgctgccgccgctcaacatgaacctggcgcgctatctggtgattcagggcattaaacagcggaaaattcgcgcccgtagcgcgctgcgtccgctggatattgtcggtttaagccaattgctggtccaggtttcaaacctgattgtcgactgcccggaaattcagcgtctggatatccatccgctgctggcttccgccagtgagtttaccgcgctggatgtgacgctggatattgccccgtttgatggcgataacgaaagtcgacttgcggtacgcccctatccccaccagcttgaagagtgggtggagatgaaaaatggcgatcgctgcctgttccgtcctatcctgccggaagatgagccccaactgcgacaattcatcgcacaggtcaccaaagaggatctttactaccgttatttcagcgagatcaacgaattcacccatgaagatttagccaacatgacgcagatcgactacgatcgagaaatggcctttgtggccgtgaggcggatggacaatgctgaagagatcctcggcgtaacgcgcgcgatctccgatcctgacaacgtagatgccgaatttgccgtattggtgcgttcagatctcaaagggttgggtttaggacgccgtttaatggagaaattgattgcctatactcgcgatcacggattgaagcggctgaacggtattacgatgccaaacaatcgcggcatggtcgcgctggccagaaaactgggatttcaggtcgatattcagctcgaagagggcatcgtgggattgacgctgaatctggccaaatgtgatgaatcgtgagtaatgtactggaaatgttgaccactttaacgggtactgatgttattattgctcgcttatgtcgtctgcatagcacagaggacccttcaatgaacagagaagaaatgcactgtgatgttgtcaaaatttaagcgtaataaacatcaacaacaccttgcccaactccctaagatttctcagtcagttgatgatgtagatttcttttatactcctgctacttttcgggagacactgctggagaaaatcgccagcgcgacgcagcgtatttgtatcgttgccctgtatctggaacaggacgatgggggtaaaggtatactcgacgcgctctatgcggctaaacggcagcgtcctgaactggacgtgagggtgctggtcgactggcatcgcgcgcaacgcgggcgcattggcgcagcggcctcgaataccaatgcagactggtattgccgactggcgcaggaaaaccccggcattgatgtcccggtttacggcgtaccgattaatacgcgagaagcgcttggcgtactgcattttaaaggctttatcattgatgatagcgtcctgtacagcggcgccagcctgaacgatgtctatctccatcagcatgacaaatatcgctacgatcgctaccagctgattcgcaatcggcaaatggcagacatcatgtttgactgggtgacgcaaaatctgatgaatggccgtggtgtgaatcgtctggataatacccagcggccgaaaagcccggagattaaaaacgatatccgcttataccgtcaggagctgcgtgatgcgtcatatcattttcagggtgacgctaatgacgagcagctctccgttacgccgctggtcgggcttggaaagtccagtctgttgaacaaaaccattttccatctcatgccctgtgcggagcataagctcaccatttgtaccccttacttcaatctaccagcggtactggtgcggaatattattcagctactgcgcgacggaaagaaagtcgaaatcattgttggcgataaaaccgcgaatgatttttacattccggaagatgaaccgttcaagatcattggcgcgctgccctatctctatgagattaacctgcgccgcttcctgagccgtttacagtattacgtcaataccgatcagcttgtggtgcgtctgtggaaagatgacgacaatacctatcatctgaaagggatgtgggtagatgataaatggatgctactcaccggcaacaacctgaatccccgcgcctggcgtctggatctggaaaacgccattttgatccacgatcctaagcaggagcttgcccctcagcgggaaaaagagctggaacttatccgaacgcacacaaccatcgtaaaacattatcgtgacctgcagagcattgccgactatccgataaaagtgcgtaaattgattcgccgtctgcgccggatccgcatcgacagattaattagccgtatcctgtaatcgaagccccgtcctgtacggggttttctcttaggagtgaactggtgcgcgtgttgattccttttacggtgttgtttctctccgggtgcagccatctggctaacgaccactggagcggtcaggataaagcccagcattttatggcatcagcgatgctatcggcagccggtaatgagtatgcgcgtcaccagggagtaagccctgaccgcagcgcagcgatagggctgatgttttctttgagtctcggagcctcaaaagaactctgggacagccgcccggaaggcagcggctggagctggaaagattttgtctgggatgtcgctggcgcgacaaccggttacgctatctggcaaatggcgcgatactaaaggcgtaagccctttcctttacggtgcaacatcaacgaaaccaggaaagccagaacggccatcgcggtaacataccagaagaacgaactctccataccgacagattttagcgacagcgcgacatattccgcagagccgccaaataacgcgtttgctaccgcgtaagataaaccgacgcccagggcgcgaacctgcgccggaaacatctccgctttcaggatcccgctaatcgaggtatagaaactcacaatcaatagcgcgcatatcactaaagcaaatgcggcataaggcgacgtcacattctgcaacgcggagagaattggaacggtgaaaagcgtcgcgagtgcgccaaaacatagcatagaggtgcgcctgccaatcttatcggataacgcgccgaataacggctgcaccaacatgaaaacacacagcgcagccgtcataatgccgctggcgacattggcatgcatacctgctgtatttaccagatatttctgcatataggtggtgaaggtataaaagcacagcgagcctgccgcggtgaaaccaagcaccatcaaaaaggctttgcgattacgccacaaacctttcaacgaaccggcttcttttaatgcgcgagtctcatgcttcgaggtttcatccagctggcgacgtagccataacgccacaaccgccagcacggcgcccagcgcaaagggaatacgccatccccaggcacgaagctcagcatcgtccagaacctgctgcaaaatcacaacgaccagcaatgccagtagttggccaccgataagcgtaacgtactgaaacgacgcgaaaaatcccttacgaccttcaagcgcaacttcactcatatatgtcgcgctggtcccatactctccccctaccgagagcccctgaaataaccttgcaataagtagcagcgccggtgcccaggtgccgatggtatcgtaaccaggtaagcaggcaatcaccagcgaccccatgcacatcatgcacaccgaaatcaacattgaggctttgcgcccgcgtcgatctgcaatgcgtccaaatagccaaccaccgataggccgcattaaaaaaccggcggcaaagacgcctgccgtttgcaaaagctgagtagtggtattaccagaaggaaagaagatatgtgcaaaatagagcgagcagaaagagtagacgtagaaatcaaaccattccactaagtttccggaagaggcccccacgatagcccatatgcgtcgccgcatctccggagcctcagcgttgtttttatctatacgctgaataatttctgccatactgttctccttgttgccaggcttaatcggccttttattttggagattcagattacgcgagacccaaaagtaaataaagtgttaattatttgtttgctaatttttatccccaccgtgcctgatgctggcgtttccgtttcagatagtcttcgtcctgacggattttatcccaccaacctttgaaaaccgttgccgccgcggccttaataggatcattaccccgtgtattcaggctgccgtcttctgcatactttttaccgcctttatagttagcgtatcgcctggcgcgggtgtatcccatctgaataaatttacgcgccatgtccataccaacgaaatcatcctgctgccggtaagcttcgaacaactggtagatctgttctgcggatttcatcgccgatgcttcatctttatagcgccagaaaggaagaatttcgcttttgtagggttcaaccagtagcaccccctgctcgcctcgtccaacctgatacaattcaggctgctggcggaagtcgatgctggaaaagtcctgctggtagttaaaaggtttgatagccaatgaaaatcctcactgcttatataagcacgtgtaaaggatagttcatcgttaatgattgggtgggttgtgctcttatcagttctacaagagcaccaacttcgtaggcgggataattcctgtaggccggataaggcggagccgccatccggcagaaacagacaaaaacaaaaggccctgtcttccgacagggcccttcgttttatttgatgcctggcagttccctactctcgcatggggagaccccacactaccatcggcgctacggcgtttcacttctgagttcggcatggggtcaggtgggaccaccgcgctagtgccgccaggcaaattctgttgccagaaacgaatcttttacaccgatgctgcgttggctgcattcgtaaagtcagtcacatacttctgtatgctccttcctttccttcatttgccgccttgcctcagcgtaaaatctttcgttcccgaaaatccggaatcactgctgaaaatcgtcttctcatccgccaaaacatcttcggcgttgtaaggttaagcctcacggttcattagtaccggttagctcaacgcatcgctgcgcttacacacccggcctatcaacgtcgtcgtcttcaacgttccttcaggagacctaaagtctcagggagaactcatctcggggcaagtttcgtgcttagatgctttcagcacttatctcttccgcatttagctaccgggcagtgccattggcatgacaacccgaacaccagtgatgcgtccactccggtcctctcgtactaggagcagcccccctcagttctccagcgcccacggcagatagggaccgaactgtctcacgacgttctaaacccagctcgcgtaccactttaaatggcgaacagccatacccttgggacctacttcagccccaggatgtgatgagccgacatcgaggtgccaaacaccgccgtcgatatgaactcttgggcggtatcagcctgttatccccggagtaccttttatccgttgagcgatggcccttccattcagaaccaccggatcactatgacctgctttcgcacctgctcgcgccgtcacgctcgcagtcaagctggcttatgccattgcactaacctcctgatgtccgaccaggattagccaaccttcgtgctcctccgttactctttaggaggagaccgccccagtcaaactacccaccagacactgtccgcaacccggattacgggtccacgttagaacatcaaacattaaagggtggtatttcaaggtcggctccatgcagactggcgtccacacttcaaagcctcccacctatcctacacatcaaggctcaatgttcagtgtcaagctatagtaaaggttcacggggtctttccgtcttgccgcgggtacactgcatcttcacagcgagttcaatttcactgagtctcgggtggagacagcctggccatcattaagccattcgtgcaggtcggaacttacccgacaaggaatttcgctaccttaggaccgttatagttacggccgccgtttaccggggcttcgatcaggagcttcgcttgcgctgaccccatcaattaaccttccggcaccgggcaggcgtcacaccgtatacgtccactttcgtgtttgcacagtgctgtgtttttaataaacagttgcagccagctggtatcttcgactgacttcagctccgtgagtaaatcacttcacctacgtgtcagcgtgccttctcccgaagttacggcaccattttgcctagttccttcacccgagttctctcaagcgccttggtattctctacctgaccacctgtgtcggtttggggtacgatttgatgttacctgatgcttagaggcttttcctggaagcagggcatttgttgcttcagcaccgtagtgcctcgtcatcacgcctcagtgttaaagtgaaccggatttacctggaacacacacctacacgcttaaaccgggacaaccgtcgcccggccaacatagccttctccgtccccccttcgcagtaacaccaagtacgggaatattaacccgtttcccatcgactacgcctttcggcctcgccttaggggtcgactcaccctgccccgattaacgttggacaggaacccttggtcttccggcgagcgggcttttcacccgctttatcgttacttatgtcagcattcgcacttctgatacctccagcaaccctcacaggtcaccttcgcaggcttacagaacgctcccctacccaacaacgcatcagcgtcgctgccgcagcttcggtgcatggtttagccccgttacatcttccgcgcaggccgactcgaccagtgagctattacgctttctttaaatgatggctgcttctaagccaacatcctggctgtctgggccttcccacatcgtttcccacttaaccatgactttgggaccttagctggcggtctgggttgtttccctcttcacgacggacgttagcacccgccgtgtgtctcccgtgataacattctccggtattcgcagtttgcatcgggttggtaagccgggatggccccctagccgaaacagtgctctacccccggagatgaattcacgaggcgctacctaaatagctttcggggagaaccagctatctcccggtttgattggcctttcacccccagccacaggtcatccgctaatttttcaacattagtcggttcggtcctccagttagtgttacccaaccttcaacctgcccatggctagatcaccgggtttcgggtctataccctgcaacttaacgcccaattaagactcggtttccctccggctcccctattcggttaaccttgctacagaatataagtcgctgacccattatacaaaaggtacgcagtcaccccaccccaaagcattcaccgcttgttttgtgtgttgggcgtcgcaaacgacgctccgccaccgcgatgctgctttgcagggccttcaacaccagagaatgctttggtggtggggctcccactgcttgtacgtacacggtttcaggttctttttcactcccctcgccggggttcttttcgcctttccctcacggtactggttcactatcggtcagtcaggagtatttagccttggaggatggtccccccatattcagacaggataccacgtgtcccgccctactcatcgagctcacagcacatgcgcttttgtgtacggggctgtcaccctgtatcgcgcgcctttccagacgcttccactaacacacatgctgattcaggctctgggctcctccccgttcgctcgccgctactgggggaatctcggttgatttcttttcctcggggtacttagatgtttcagttcccccggttcgcctcattaacctatggattcagttaatgatagtgtgacgaatcacactgggtttccccattcggaaatcgccggttataacggttcatatcaccttaccggcgcttatcgcagattagcacgtccttcatcgcctctgactgccagggcatccaccgtgtacgcttagtcgcttaacctcacaacccgaagatgtttcttacgattcatcatcgtgctgcgaaaatttgagagactcacgaacaactttcgttgttctgtgtttcaattttcagcttgatccagatttttaaagagcaaatatctcaaacgtgactcgtaagtcagttttgagatattagggcaggtgactttcactcacaaaccagcaagtggcgtcccctaggggattcgaacccctgttaccgccgtgaaagggcggtgtcctgggcctctagacgaaggggacgtatcagtctgcttcgcaagacgccttgctatttacttttcatcagacaatctgtgtgagcactgcaaagtacgcttctttaaggtaaggaggtgatccaaccgcaggttcccctacggttaccttgttacgacttcaccccagtcatgaatcacaaagtggtaagcgccctcccgaaggttaagctacctacttcttttgcaacccactcccatggtgtgacgggcggtgtgtacaaggcccgggaacgtattcaccgtggcattctgatccacgattactagcgattccgacttcatggagtcgagttgcagactccaatccggactacgacgcactttatgaggtccgcttgctctcgcgaggtcgcttctctttgtatgcgccattgtagcacgtgtgtagccctggtcgtaagggccatgatgacttgacgtcatccccaccttcctccagtttatcactggcagtctcctttgagttcccgacctaatcgctggcaacaaaggataagggttgcgctcgttgcgggacttaacccaacatttcacaacacgagctgacgacagccatgcagcacctgtctcacagttcccgaaggcacaaatccatctctggattcttctgtggatgtcaagaccaggtaaggttcttcgcgttgcatcgaattaaaccacatgctccaccgcttgtgcgggcccccgtcaattcatttgagttttaaccttgcggccgtactccccaggcggtctacttaacgcgttagctccggaagccacgcctcaagggcacaacctccaagtagacatcgtttacggcgtggactaccagggtatctaatcctgtttgctccccacgctttcgcacctgagcgtcagtctttgtccagggggccgccttcgccaccggtattcctccagatctctacgcatttcaccgctacacctggaattctacccccctctacaagactcaagcctgccagtttcgaatgcagttcccaggttgagcccggggatttcacatccgacttgacagaccgcctgcgtgcgctttacgcccagtaattccgattaacgcttgcaccctccgtattaccgcggctgctggcacggagttagccggtgcttcttctgcgggtaacgtcaattgctgcggttattaaccgcaacaccttcctccccgctgaaagtactttacaacccgaaggccttcttcatacacgcggcatggctgcatcaggcttgcgcccattgtgcaatattccccactgctgcctcccgtaggagtctggaccgtgtctcagttccagtgtggctggtcatcctctcagaccagctagggatcgtcgccttggtgagccgttacctcaccaacaagctaatcccatctgggcacatctgatggcaagaggcccgaaggtccccctctttggtcttgcgacgttatgcggtattagccaccgtttccagtagttatccccctccatcaggcagtttcccagacattactcacccgtccgccactcgtcagcaaagcagcaagctgcttcctgttaccgttcgacttgcatgtgttaggcctgccgccagcgttcaatctgagccatgatcaaactcttcaatttaaaagtttgatgctcaaagaattaaacttcgtaatgaattacgtgttcactcttgagatttggtattcatttttcgtccgaggacgttaagaatccgtatcttcgagtgcccacacagattgtctgataaattgttaaagagcaggtgcgacgcggcttgcagctcaccgtcgcgaggtggcgtatattacgctttcctctttttgagtcaagcctttattttcgctttcctcacagacttcttaacgaagcttttctgacccggcggcctgtatgccgttgttccgtgtcagtggtggcgcattatagggagttattagagcctgacaagacctaaatgcaaaaaaaagctcaaccgttcacttttcaaacaacatttgaaccaaaagcctattttcgcctggtttttaaacaaaaacgagcccgtcagggcccgttttattcaaatttgtgacttactgcactgccacaatacgatcatcattggcttcaaggcgaatcactttgccaggaaccagttcaccagacaggatttgctgcgccagtgggttttcgatctgctgttgaatagcacgttttaacggacgcgccccgtagaccggatcgtaaccgttggcgctcaacagtttcagcgcctcgtcggagatatggatttcataaccacgttcttccagacgtttgtacagacgctgcagctggatctgagcaatagaagcgatgtgttgttcacctaacggatggaataccacaacttcatcaatacggttgataaattccggacggaagttttggctaaccacacccagcaccatctctttcattcgaccgtaatccagttcgccaaagcgctcctgaatgagatcggaaccgaggttagaagtcataatgaccaccgtattacggaagtcgaccgttctcccctgcccgtcagtcagtcgaccgtcgtccagcacctgcaacagaatgttgaatacatccggatgcgctttttccacttcatccaacaagatgacggaataagggcgacggcgcaccgcttccgtcaaataaccgccttcttcatagccgacatatcccggaggcgccccgaccaaacgagacacggagtgtttctccataaactcagacatgtcgatacgcaccatcgcgtcgtcgctgtcgaacataaagttagccagtgctttacacagttcggttttaccgacccccgtcggccccaggaacaggaaggaaccaatcggacggttcggatcggacagcccagcacggctacgacgtatggcgttcgatactgcttcaacggcttcattctgcccgatcacacggctgtgtaactcttgttccatacgcaacagtttttcacgttcgccttccagcattctggaaaccggaataccggtccagcgcgctagcacttcggcaatttccgcatccgttactttgttacgtaacagacgcatggttttaccttccgactgggtcgcggcttccagctgtttttccagctccggaattttgccgtactgcagttcagacattcgcgccaggtcgccaacgcgacgcgcctgctcgatggcaatcttcgcctgctccagctccgctttaatagtttgcgtaccagagagcgacgctttttccgctttccactcttcttccagctcagaatactggcgctctttgtcgtccagttcttcgttgagcatatcgagacgttttttactcgcctcgtcagactctttcatcaacgcctgctgttccagtttgagctgaataatgcggcggtcgagtctgtccagctcctccggcttagagtcaatctgcatacgaatgctggatgcagcttcatcgatgaggtcgatagctttatccggcaactgacggtcggcgatatagcggtgagataatgttgccgccgccacaatcgccgggtcagtgatctgcacatggtggtgcagctcgtaacgttctttcaggccacgcagaatagcgatggtgtcttccactgaaggttctgcgacaaacactttttgaaaacgacgttccagcgccgcgtctttttcaatgtactgacggtattcatccagcgtggtggcgcccacacagtgcagttcaccacgcgccagcgccggtttcagcatattcccggcgtccattgcgccatcagccttacctgcgccaaccatcgtgtgcagctcgtcaataaacaggatgacgttgccttcctgtttcgccagatcgttcagcacgcctttcagacgctcttcaaattcgccgcgatatttcgcccccgccaccagcgcgcccatatccagcgccagtacgcggcgaccttttaagccttcagggacttcaccgttaataatgcgctgcgccagtccttcaacaattgccgttttaccgacccctggctcaccgattaacaccgggttgtttttggtacgacgttgcagtacctgaatggtacggcgaatttcttcatcacgaccaattaccgggtcaagcttgccttgttcagcccgctcggtcagatcgacggtatattttttcaaggcctgacgttggtcttcagccccttgatcgttcacgctttcacctccgcgcatctgttcaattgcctgagtgatattggccgtggtcgcaccggctgatttcagcagatcggttaacgtgccgcgagactcaagcgccgccagaacaaacagctctgacgaaataaaattgtctccccgtttttgcgccagcttgtcgcaaaggttcagtacgcgtaccagttccgaagaaggctgtacgtcgccgccggtgccttccacctgcggtaaacggctcagcgcctgatcgatagcggtgcgcaactggccagcattaatgccggcggaggttaataaaggacgtatcgatcccccttcctggttcagcaaggcgctcattaaatgaagaggttcgatgaattggttgtcgtgccccagcgcgagcgactgggcatcggcaagagcaagctggaatttgttagtaagacgatccagacgcataactcctcccataacaggtcaaaattgctactggagattaaatgaggtcatccctcaattattcaaggtgaatgacctgaattatgtgaaaagaaagttacccgtaccggatcgtcttgattctttaggttatatcagccaaataaaacttgccatacgacctgtcgtcttgtcgcgacgataagagaagaaagtctcactttcgctaaaggtgcagcgatccccgccatagacatgttcaacgccggtattcgccagacgttggcgtgcaagctgataaatatccgccagaaatttttccccgtgcggcaaaaatgcgctatcggcttgcgcatcttttgctaaaaatgcgtcacgcacttccggccccacttcaaacgcggtcgggccgatcgccggacctaaccaggcgatgatattttctggtttgtcagcaaagcaggtgacagtttcctccagtacgccttcacataatccgcgccagcccgcatgagccgccgccacttctgttccctcacggttacagaatagcacaggcaggcagtctgccgtcattaccgcgcagacggttcctggcgtattgctgtaagacgcatccgcacgtttggaggcataaggttctccggtaagcctcaacacatttttaccgtgaacctgttcaagccagacaggtttcgaaggcagattgcccgccgcaaacagacgcttgcggttctcttcaacatgctccgggttatcgccgcaatgcgcgcccagattcagcgagtcgtaaggcggtaaactcaccccgccaatacgggtagaactacaggctgcgacgcctttcggcagcggccactgcgggacaatcagtgcattcataaccagtccacatcatctttatgatcttcaaaatcggcgcgcatcgcatcgataaggtccaccatatcttgtggaatcggcgcgtgccactccatttcgatacccgatacaggatggtagagacgcagcatcgttgcatgaagcgcctggcggtcaaacttacgcagagtggaaataaactcttccgatgcgcctttcggtggacgtggacgaccaccgtagacctgatcgcccactaacgggtgcgtaatatgcgccatatgcacgcggatctggtgcgtacgcccggtctccagacgcagcctaagacgcgtgtgcacacggaaatgttccataatgcggtagtgggtcaccgccggtttgcccatgggatgcactgacatatgggtacgtttggtcgggtgacgactgatgggttcattcaccgttcctcccgccgtcatatgtccgatcgcgaccgcttcatattcgcgggtgatctcgcgcagctgcaaagactccaccaggcgcgtttgcgccggaacggttttggccaccaccatcagccccgtcgtgtccttatccagacgatgtacaatgcccgcgcgcgggacatccgcaatcggcggataataatgtagcaacgcgttcagtaccgtaccgtccgggttacccgcgccaggatgtaccaccagatcgcgtggtttgttgataaccagaatatcgtcatcttcataaacaatatctaacgggatatcctgcgcttcaaaacgaatctcttcgtcgatctccgcatcaatagccacccgctcgccacctaacactttttcttttggcttatcgcaaagttgaccattgaccaacacgcgctgattcaaaatccattcttttatacgcgaacgtgaataatccgggaacatttcggccaaagcctgatctaagcgttgaccgagttggttttcggagaccgttgcggtgagttgtactcgttgtgccatatacagcttcttcgtttaacgttgggttttacggctttgccgtttaatatagtgtgctattgtagctggtcttaaccgggagcaggaacagagaatctcccgtaaaacattttgaggaaagtcaaaacgtcatgacgcgcatgaaatatctggtggcagcagccacgttgagcctgtttctggcgggttgctcgggttcaaaggaagaggtgcccgataatccgccgaatgaaatctacgcgactgctcagcaaaagctgcaggacggtaactggaaacaggcaataacgcaattggaagcgttagataatcgttatccattcggaccgtattctcagcaggtgcagttggatcttatctacgcctattacaaaaacgccgatttgccgctagcgcaggccgccatcgatcgttttatgcgtcttaatccaacgcaccctaatattgactatgtcatgtacatgcgcggcctgacgaacatggcgctggatgatagcgcgctgcaaggtttctttggcgtcgatcgcagcgatcgcgatccgcaacatgcgcgggcggcgttcaatgacttttcgaaactggtacgcagctatcctaatagccagtacaccaccgatgccactaagcgtctggtattcctgaaagaccgtctggcgaaatatgaatattccgtcgcagagtactataccgcgcgcggcgcatgggttgcggtcgtaaaccgggtagaaggtatgctacgcaattatcctgatacgcaggccacgcgcgatgcgttgccgctgatggaaaacgcctatcgtcagatgcagctgaatgcgcaggctgacaaagtcgcgaaaattattgccgctaacagcaaaaacacctgaagcaatacaaacaagcaaaacggcagccttccggctgccgtttttttattcggtatctgatgcaacagaaatgatttcactgcaacgcatccagtcaaatatggcctgctttcagccattcctcaagtaaaagatcgcttcttcctgcgatgcctcacaaaaagttcgccttgacaaaaagtgacaaaataatgtgatttacatcacacattttgacattaagaacggtatgctggaatcaccaagacgggaaagacaagaggtaaaatttatgacaatgaacattaccagtaaacaaatggaaattactccggcaatccgccaacatgtcgcagaccgtctcgccaaactggaaaaatggcaaactcacctgattaatcctcatatcattctgtctaaagagccacagggctttattgctgacgccaccattaatacaccgaacggacatctggtcgccagcgcaaaacacgaagatatgtacaccgctattaatgaattgatcaacaagctggaacggcagctcaataaagtgcagcacaaaggcgaagcccgtcgtgccaccgcatcggtgaaagatgccagcttcgtcgaagcagaagaagagtagtcccttacattgagtgtatcgccaacgcgccttcgggcgcgttttttgttgacaggattaaaacagtacgggtactgtacttacgtacacaaaggaaacagttatgaagctcacccggtttttcttcgcattcttttttatcttcccctgaccgggaggcgtttcgtcatgtgataaagaatgcgaagacgaacaagaaggcctcccccaccgggaggccttttttattgataacaaaaaaggcaacactatgacatcggaaaacccattactggcgctgcgagataaaatcagcgctttagacgaagagttactggccttactggcaaaacgacgcgcgctggcgattgaagtgggacaagcaaaactactgtcgcatcgtccggttcgggatatcgatcgtgaacgcgcgctgctggacaggctcatccatctcggtaaagcccaccatctcgacgcacactacattacccgtctgttccagcttatcattgaagactccgtgcttactcagcaggcgctgctgcaacaacatctgaataatactcaccctcattcggcacgtattgcgtttcttgggccgaaaggctcctattctcatctcgcggcgcgccagtatgctgcacgccattttgagcaatttattgagagcggttgcgcaaaattcaccgatatttttcatcaggtcgaaaccggccaggccgattacgccgtggttccgatagagaacaccagctccggcgctatcaatgatgtgtacgacttattgcaacacaccagtctgtcgattgtcggtgagatgactgtcactatcgatcactgcgtgctggtttccggcgctacagatctgaataccatcgaaacggtgtacagccatccgcagccgtttcagcagtgcagtaaatttttgagccgctatccgcactggaaaatcgactataccgagagtacgtcggcagcgatggaaaaagtcgcgcaggcaaactctccgcgcgtcgcggcgctcggcagcgaggcaggcggcatgttgcacggattacaggtgctggaacgcatcgccgcaaaccagacgcagaatatcacccgctttctggtactggcgcgcaaagccattaatgtttccgatcaggttccggcaaaaaccactctgttaatcgccaccgggcagcaagctggcgcgctggtcgaagcgctgctggtgctgcgtaaccacaatctcatcatgacgaaactggagtcgcgccccattcacggcaatccgtgggaagagatgttttatctcgatattcaggcgaacctggagtcgcaggtaatgcaaagcgcgctaaaagagctgggcgagatcacgcgctcaatgaaagtgcttggctgctatcccagcgaaaacgtcgtgccggtagaacctgcctgacgttcaataaaacggcttttcttcatccctgcgacggctacctgcagggtgaagatggcgccggagagcggataatccgccacttcctgagcagacatattttctctggtagttgtaataaacagcgttttcatatctgcgccgccaaagcaaaccatcgtcggacaacgtaccggcaaccggtactcttccagctgctcttcttgcggtgagaaacgcgccacgcgccagccgtcaaacatcgcgctccagtagcacccttcgctatccatcgccgcgccgtcgggaagtccttctccttcgccaaaatggcgaaaaagttcacgcttgcccggatcgccatgcttatcaagtaacgtgcggtatatcacgccattcggcgtatcggaggtatacatccactggttatccgggctgaacgccaggccgttgtgtccctggatatcgcactggatcacttttgccgtcaggtcatgatcgatccgcatcagcaacgcgccattatagtcacctggcgcccagaacgttccggcataaaaacgtccatcgccatcagtgccgccatcgttaaaacgcgccagtttcgtattagagggattgtcgcaaaccttacgctgcaataatccatttttatcggccagccagatagcatgacgcatggccacaataaatccgccctgctcacgcaaggcaaaacagcccacctcttccggaaacaccagcacgctatgcgtcccactcgccggatggtaacgatggatctcctgttccaggatatcggtccaatacagcgcgctttcatcctcgctccatgtggggcattctggtagatgtccgacataatcaaataaaacgtgcggcgtagtcataacggttccttaaacgaaaaaagccagcaaagctggcttttagtatagatgtcatcattatggtcggctgtcattcgcctgacgcaataacacacggctttcattctggaagcgtctggcataatcgccaaaccagtgttcaactttgcgaaaactgtcgataaaagcctgcttatcaccctgttccagtaacccgatcgcatcgccaaaacgtttatagtaacgcttgataagcgccagattgcgctccgacgacataataatgtccgcatacagttgcgggtcctgggcgaacagacgcccgaccatcgccagctccagtcgataaatcggcgatgatagcgccagaagctgctcaagctggacgttctcttccgccagatgcagcccataagcgaaggtagcaaagtggcgcaacgcctggataaaagccatgttctgatcgtgctcgacagcgctaattcgatgcaaccgcgcgccccacacctggatttgctcaaggaaccactgatacgcttccggttgacgcccgtcacaccagaccaccacctgcttcgccaggctcccgctgtccggaccaaacatcggatgcaagcccaacacggggccatcatgggccgccaacattgcctgcaacggaccgcttttcaccgatgccagatcgaccagaatacagtcggacggcaggggcggcagttgcgctatgacctgttcagtaacatgaatcggcacgctgacgatcaccattccggcatcggcgacaatgtccctggcgcgcggccagtcctgctgttccagaatacggacctgatagcccgacagcgtgagcattttttcaaacagacgccccatctgtccgccgccgcccacaatgacgaccggacgcagagaaggacaaagcgttttgaaccccttatcattttcgctggagtaagattcacgcattacccggcgcaggacatcttcaatgagatcgggcgggacaccgatcgcttctgcttccgcccgtcgtgaagccagcatagaggcctcacgctccggcacgtaaataggcaggccaaaacggcttttcacctcgccgactttggcaaccagttccaggcgcttagccagtaaattcaacaacgctttatcgacatcatctatttgatcgcgtaatgcggtcaattcagcaaccataacaacctcttatgcgacgcgcaccgccagctggccgctcaaatctttatgaatttcacgtaacagggcatcggtcatctcccagctaatacaagcatcggtgacggaaacgccatacttcatttcgctgcgcggctgttcggaagactggttaccctcatgaatattactttcaatcattaagccaatgattgaacgattgccatctttaatctgcgcaaccacagattcggcaacggctggctggcggcgataatctttattggagttaccatgactgcaatctaccatcagcgaaggacgtagtcccgcctgttccatctctttttcacactgagcgacatctgccgggctatagtttggcgctttgccgccacgcagaatcacatggccatgcggatttccctgggtttgcaataacgcaacctgaccggcctggttaatgccaacaaaacgatgaggttgcgcagcggcgcgcatggcgttaatcgctgtcgccaggctgccatccgtgccgtttttaaagccgaccggcatagaaagaccagacgccatttcgcggtgggtttgcgattcggttgtgcgcgcccctatcgccgaccagctaaacagatcgcccaggtattgcgggctgttcggatccaacgcttcggtcgccaatggcaaccccatattcaccagttccaccagtagctgacgcgctattttcaacccggcttccacatcaaatgagccatccatgtgaggatcgttaatcagccctttccagccgacggtagttcgcggcttttcaaaatagacgcgcattaccagatagaggctatcgctgacctctgcggcaagggctttaaatcgacgggcatattccagagcggtttcaggatcgtgaatagaacaaggaccgcataccaccaacagacgcggatcgcgcccggcaataatgtcagaaatgattccccgggactgcgctatctgcgcttcctgcgccaggctcaagggaaaggccgctttaagctgctccggcgtcattaatacctgttcatcggtgatacgtacgttattcagcgcgtctttttgcatgatggcgatcctgtcttttcttgtttgcgatagttgatcctccacgaggatgtttaaaccataccacaaaaagtaaagatttcaatccatattacgtaaaataaactttacaccatgcgcaatcgtcgattaatctccctcatttcgtatcaaaaactttacacaacaagtgaattattttattcccagcctcagaaaagcggtaaaatgagcgatgctcgctattttttgattattttttctccgcacacatatttttactttctgatatagggtgattaataccattatcacaagaatttaatatcagggatatcacttaaattattcatattatcaataagacataatgacgatatggcaaaataatgttattttgctacaaacaatcacggatgtattttaatgctttacgactgaagatggtggggacttgttaatgcgtttttctcaccgatttatccttctgttatcgctattattagcaagcttgcctctgtatgctcaacgcgtcacggaagaagagaaatccgtacgcgccatcgtctccggtatcgtcagttatacacactggccggcgttatccgggccgccaaggctatgcatattttcatctgcgcgttttgtcagggtacttagcgaagaggctgactgggctttcccttatcaaccgcttgtcatccgtaccacacaagaagccctgagcgcccgctgtgatggtttttactttggcaatgaatcgccagcttatcaggtggagttaacgcgtcattatccagttaatgccttgttattaattgccgagcaaaataccgaatgtattattggcagcgcattttgtctgatcattaacaatgatgaagtcaaattttccgtcaacctggactccctctcgcatagcggcgtgagagtaaatccagaagtattaatgcttgcacggaatcaaaagcatgaataaggaattttctctgtccaggccaacatttaaacgcacactacggcggattagtataatcagcgtgctgcttacaatgacattgatctggctattaatttgcgttgcgtctgtccttacgctcaaacagtatgcgcaaaagaatctcgatttgaccgccgccacaatggcccatagccttgaagcggcactggtattttccgataacgcggccgcagcggaaacgctcgccacactgggacgccagggacaattttcagcggcggaggtccgcgataaaaatggccgtactatcgcctcatggcgctatgatgcgcgagccgcagacgataagctcattggcttaattagccactggctttttccattgccggtatcacaacccgtctggcacaacggcagggccatcggcgaagtacggcttgtcgcccgcgacagccttattggtcattttatctggctatcgctggcagtgctgacaggatgtattctgctggcatccggcattgccctgctgctcacgcgttatttacacaatggcgttgtggatgcgctgcaaaatattactgaagttgtacacgacgttcgcactaaccgaaatttttcacgccgggtacctgatgagcgtattgcggaatttcacctgtttgcgcaggatttcaatagccttctggatgagatggaagaatggcagctacggcttcaggctaaaaatgcccagttactacgtaccgcgttgcacgatccgctgacggggcttgccaatcgcgcggcatttcgcagctgtattaacgcgctgatgaaggacaattccgctcgtagcagttcggcattgttatttctggatggcgataactttaaatatattaatgatacctggggacatgcggcaggcgaccgcgtacttatagaggttgccaaaagattagcggaattcggtggtagccgttatcagacttaccgactcggcggcgatgaatttgcgatggtgctttacgatgtacattcggaatatgaagtacaacgtatttgcgcagcgctatcccaggcgtttaatcgaccttttgaactgcataacggccagcgaataacgatgaccctgagtattggctttgcgctgacatgggaacatgccactgccgaaaaactacaagaactggccgatcgaaatatgtatcaggctaaacaccggcgtgcggagcgctcgctaaactaaggaacgggcctggccgtttctgactcagcgttgagaccactgacccagcctaatcatgcaaccatctatggcgtggagcaaacccataaaaaaggggccagcgtaatgccagccccttcttttctacaagctttcggatgttgcgaaagcgcgttcttagttaagacgctcctattaacataccttaacaaacaatcacttaccatataaaacaactagttaaagtaatttttaatgcaatgaattgcagtgttatgcaacctctgccgccatattgtcgccaacatacagcgataacggattgagagttacagcttgttcaaggtggtcaggagcaaagtgcgcatacttcattgtttctcgaatattggcgtgtccgagaattttctgtaacaccagtatatttccgccgttcatcataaaatgcgcaccaaaagtatgacgcaaaacgtgagtcttctgcccttccgtcagctcaatgttcgttagtttgagcatcttcttgaactcctgatagcagggcttaaacattctgccctgacgttcggataactcgtcgtaaagccatttaggaatcggaaccgtgcgattcttcttacctttggttttggtgaaggtcagcttgtatggagaaagttgggggcgtgtaagtctctctgcttctccccatcgtgcgccagtagctaggcacaccttaacaatcatcgtaagattttctttgccatattgttcacaggctcggaacagctccgcgagttgagacaaagttagccacgacatttctttctcagcttctttgaatacgcgaatcccgtccagtggattgggtaaactccactctcctaatcgtcgcagttcattgaacaccgcttcgaggtattgctgctcgcgattgactgttataggtttggcgatccacttcgccgggtctttgtgatagccgttgtctatttcgccacgtaatcgacggtcgcggtaatgagcccaatctttagcggtaagacgagatgcaatagggtcgcccaacccgttacatacaatttgaagcttagctaaccgcgacttactggcgactaacgcttgaccgtgcaaattgtgccaaagctgaataatttcgcttaagcgtcggcggtcttctttcttgccgagccacggcttatcttcactctcgcttttggtaaatgcttcgaatgcctcggcctcacctttggtattgaattgccgacgtatacgccgcccttctcgaccatttggatagagttcacataaccatttgccacttttttgtttacttacagtcattgcgataccgaggctaaaagagaattaattacaaagggctgtagcggcatcaatcaccggtgaaatggaaattttaacaccgtcataatcagggtcatccttccatacgtcatctaagttagatccttccatctttcctgacttaacagcatcaacagccatgccattcaatggatatctgtcatcagttttaatgtcgtacacaaaagcataagcacggttaacacatgatactttcgccttttcaaaggttagaggccacttatcgccataggtagatccgtctatctctttggttttttcagcagcagcgacaccaaacgaaagagtaagaagcagagttaaaaaaagtttacgtttcataagttcccttatacatgtttttccagagtgaatatcacagccccagcaggcgtaatgtctgtaatgttgcattcaaattcagcagacttattcgatagtctaactttcccacccggcaatctgattacgtcaaaaacatcaagagcaccatcaataccaataagccagcggccatttcctatttttgagctggagcagtcgacaagccaagatacactcacgccatcaataaacactaaatcatcagtgtttgccggaaccatagagacatcaggagtccaatgcccgatatctttgagctcgccagcttcaaggcggcatttcctgatggttaaagcattagacggttccccatctttgctgttacgcatctggccttttcccgtagacaaccatcctaacgaaacaccagtatcgagggcgcaggtcacaaccacgtcaccagggaaaaaatcgcgtctaacccaagtacttatagtgccagaagatatgcctaataaatccccaagctctttttgcatcgtaaaaccataggcatcgaggatgcgacgcaataccgcccttcctccatttgccatgatttcatcatagagttgcttacctttgagatttacttgacccacatccaactttgcatttgcaagctcaccattaacaagccagcgcaagtcagcccctgtatcaagagcgcactcaacgaaaacgttgcttggaattacgtttcttgcaagccaactacttacgttatttgcatggataccgagcctttcagcgagttccttttgctgcttaaagccgtatgcagaaaggactctctccagagcagctggagcgtcaacatcatttttcgccatatcacaccaacaaaaattttgtttacaacaaaaatttagcgatctatattggtgctcatcgaccaagatgcacaccactgcactacatttcaaacaacaggagataatgcgatatgtcagatgcaaaatcaatcccgctgcatgacgcacaaaacttacaaaatcaaactgtattgctagacgctggtcagttcaacgcgcttgtaaccatgatgcagctatccatgcaaaacatgattcgtacagcgatgttagacaccatgtcagtaaaagacttcgccgccgcccgtggcgttagcgagcgtctggtctggcaatggattgatgagggcgtccttctcaaagctcccaccaaagatgttaccagcaaagaaaaagccgctaagcgtagccgcacccttatcaacgtcaaagcatggcgtgacaaactgacccagcaagctatcgattgccgttatatcaactaacagtcatcgcttaactgaacttgattttgcaagttaaagggagttacagcatgttagattttcgtgtttcgtcacatgcgcactttgacgaggcctgcagaaaattcgcagctactcataacgtgaaagaactagcgaataaagccgcaatcaagccgcatacgctttacaacaaactcaacccagaacagccgcaccagttaacgccgcgtgaaatctggacgctgacggacctgaccgaagactcgaccctcgtcgatggttttctggcgcagatccattgtctgccatgcgtaccggtcaacgagctggcaaaagagaaactgcaatcctacgtcatgcacgcaatgagtgaacttggcgaactggcaagcggtgcagtttccggcgaccgcctcacgccagccaaaaaacaaaacatgattgctagcgtaaatgcggggattcgcatgttgtcattatcggcaatggcgctgcatgcacgtctgcagactaatcccgctatgtcgagcgtagtcgatactatgagcggtattggcgcatcgtttggtctgatttgaggtgcgcatgctgaaaagtgaaccgtcattcgcgtctctgctcgttaagcaaagccccggcatgcattacggccacggctggatcgcaggtaaggacggcaagcgctggcacccttgccgctcacaggatgatttactggctgacctgtccaccaaaaaacaggggaaatcatggctatcgaagctgtttccgagactgttccgctaaaggcgggtgaacgtctggctggtctcaatcatgtggctgaattgcgcgcgagatattggggcgatagctggaaagaggttgagcgctttgtcgatgatatgcgcgataaacgtgactcacaatttgaagaaaataatcgggcgctggccgctattttctttttggcaaaaataccggcggctcgtcatgagctcgaattaagtgagctgactactgacgagaaaaaggcgcttattacagcgatgaatcattttcgtgcagtggtgagtttatttcccaaacggctaaccatgccgaattaatcaaaacagaaatttaatggcgtaaacccgccgggcttcttattgcccgaaatcaggagagttaattatgcgtaataccgaaatccgtagttttaacactgatagtgatgcgctggccgtattgctgatcgatgcaaaaaaagaagagcgtaaagaccgcgcgctcgctgtttccatccgccttgaggcgctggctatccatatcaccaaagagggtatgagcggcaccgaagctgccgaactgctgcgtcgtgaagcaacccgctttgagaatgaatcacaggagctgcactaatggccgacgcaatagatttagcacaacagcgcgagcaggaagaccgcgagcgccacatcagcaacgcgcgcagccgtatcgctgcgccttcccgttttctttgcgaagaatgtgacgcaccaatcccggaagctcgccgcgctgcgattccgggcgtggctttttgcgtgacctgccagcaaatcgccgaacttaaattaaaacactatcggggtgcgatatgactaccagaccactaagccagctcaagaaagcggcacgtatttgggataaagcccatcgaggcatcgcggcgttttggctgcgtcagcatgccacatccaaacagggtgaatatcacccgaaagaatcgaagctacaaattttgaaaaaacttcgggaacagcaaaaagctcagtcgacatcggtaaatgctggggatttccagagcgataaaactcaacagtccgccgagtacagcgagccgacacatgaatatctgtcgatagttcttcccaggtctgccagtcatccagttgagatactggggtatccaaataacgtcgatttaaaatttgtaaggcgtgccgaacatgtgttgaccattcttcgcgtggtttccagctatgtggacaattccactcaattttccgacctagctcatgccgaccagctattgaaagaggtagccggtctgctatgtggcattgagtctcagaaagaaaagcatcgcaaatgcccagcatgtcggatgcggaaatgatcttcattggttctttcgtagcttcgaaagctgtcacctctgtaatcaaatcaacatagcggcgttgggtgggatcttcttcagtgaataaagtcatagacacacctgtctcagcaaaggctatgggtgagattgattatgcctttgtatggaattttccaaaacaggcaatagccagcccatatcttacctatgaccaacaacatcgccgcgaccgtatgctcgcggctttgctgcatgcgagaaaggtgctttctctccagcctgaatgcgtgcgttttgatgtttatcgcaccgctgctgtgctggagaaaaatcagggcagtcaacgagccaatgcctttttaataagtttctgcaaaagggtattgccacgtcttgaactggtcgcaaaaaaatacgagtgcgcgggtatcaacagcaatgtatcagccgctgtttttggcagtcattttgatactgaacttatgcaatatctggcgtcacgcatggtcaatatggttgccagatataaccgactcccggacatgtcacgcgccgatatcgaccttttggccgctgatatcgcgaatttcattcgcgctgaactagctgacattgatgacaccggatttagcgagcttaaaacgctgtacacctggtacatgcgcgccggttttatttctctgcaattcaatgttacccctccgcattgggagcgagtgacaaagaaatatgtcggagaagatgaaatcgccccggccatcgctcgcatgtttaacgatgtgtggtggcgtggtcgtctgcgtcgcattgcggctgcatggcgcgaacatctgcaaattactgtcggtaacgtcagtaagaaaaagcatgcctatgcgagtaaaaactgcgtgactgactggcgtgaacaaaagcgccgcactcgtgaatttctcaaaggtctggatctcgaagacgaagacggcaaccgtatcagcctgattgaaaaatttgacggctcggtcgctaaccctgcgatacgccgctgcgagctgatgacccgcatccgtgggtttgaaaatatctgcaatgaactcggatacgtcggagagttttacaccctgaccgcaccgtctaaatatcatgccacgactaaagcgggataccgtaacagcaaatggaacggcgccagcccgtcggacacgcagaactacctaaccggcctttgggcgcgcattcgtgccaagctacatcgggaagaaattcgcattttcggcatacgtgttgccgagcctcatcacgacggaacgccgcattggcacatgcttatgttcatgttgccagaagacgtcgagcgcgtgcgcctcatcatccgcgattatgcatgggaggaagaccgccacgaacttaaaagtgataaggctaaaaaagcccgctttcatgctgaggctatcgacccggagaaaggcagtgctaccggctatgtcgcgaaatacatttctaaaaacatcgacggttatgctctcgatggtgaaaccgatgacgaaagcggtgagctgctgaaagagacagcccccgctgtatcagcatgggcggcgcgctggcacatccgtcagtttcagtttatcggcggtgcgccggtgacggtctaccgtgaattgcgtcgtctcgctgataccgaggccgcgcacggtctgagcgttgagtttgccgccgtccatgatgccgctgacgccggtgactgggctggttacgttaatgcgcagggtgggccgtttgtccgtcgcgatgatttgcaggtgcgcacactgtatgaaccgcgcaccgagtttaatcagtatggtgaggaaaccgtctgcattcgtggcgtatacgattccgctattggtgctggcactccgattttaacccggctaacgcagtggaaaattgtgccgaagcgtgccgttgatttggccgttgacgttaagggcgctcctgcgccctctcggacagcaacgcggtatgtgctaaagcttgatgactggatcaaagacaacaagaagttagcggaaactatcggcatcatcgccggtggtgcactggctctgattggtatcatcggcggtattggcctcgttgcgtggccggttgttatggggattaacgccattatcgctgctgctggcgtgctgggtacggtctttactgtcaccggtggtgccattgtgaccgcactcggcgcgattacctggccgattgtcgcagtgggggcggcggttgtggccggggctctactcatccgtaaatattgggagcccatcagcgcatttttctcgggggtgattgagggcatcatgagcgcctttgcccctgtcggggaaatgttcgctccactggctcccatttttgatggtctcggcgagaaactgcgcggcgtctggcagtggtttaaagacctgatagcaccggtcaaggccacgcaggaaacgcttgatagctgcaaaaatgtcggcgtcatatttggtcaggcgctagccgatgcgctgatgttgcctctgaatattttcaataagctgcgtggtggcctcgatttaattctcgaaaaactaggcctcgttaaaaaagaatcgagcagcattgataaggaaacagcgcaagtgccgccggttggtcagggtggagggtatattccgacgaccagctcgcttggtgggtatcgggcttatcagcccgtcacggctcccgctggtcgtacctacattgaccaaagcagcccaacctatcaaatcaccctgctgggtggtggagctccaggcggtcagttgggtaatcagttgcaggatgcgttagaaaagtatgaacgcgacaagcgagccaaagcccgcgccagcatgatgcacgattgaggagacactgattatgatgcttgcacttggaatgttcgtgtttgaacgccgcaccctgccttatcagtcgatgcaacactcgaaggattaccgctgggtgtctaatgacagggttggtaaacctcccgcttatcagtttctcggtgagggggagacctcaattcagcttgccggtacgctttatcctgccattaccggtgggcgtatatcactgagggctgttgaactaatggccgacgagggcagagcgtggccgctgattgagggtaccggcaatatcctcgggatgtatatcgtcgataaagtctcgactacacacactgaatttttcagtgatggcgcggccagaaagattgatttcacactttcgctgaaacgggtcgacgaatcactggcggcgatgtttggcgacctgaataagcaggccagcgatctgcttggtacagccggtaagctgaccgataagctacaggggatgttcggagggctgaccgcatgatgacgggcatgaccattgatgccggggcgagccttgcaccggcatttatgctgacgctgaacagccaggacattaccagcaattttagtgaccggctgatttctctcaccatgacagataaccggggttttgaagctgaccagctcgacattgagctcgacgatactgacggaaaagtcgagttaccactgcgcggggcagtgctgacgctgtggcttggctggcagggttcggcacttctgaataagggcgatttcacggttgatgagattgagcaccggggcgcgcctgatacgctgaccattcgtgcgcgtagtgcagattttcgcggaacgctcaattcacggcgtgaggaatcatggcacgacaccacaatcggtgagctggtcagcgccatcgcaaaacgcaataaactgacagccagcgtcgcggattcgctgaaaaaaatcccggtaccgcacatcgaccagtcgcaggagtccgacgcagtatttctgaccagactggctgagcggaacggggcgacagtatcagtgaaagcggggaaactgctgtttctgaaagccggtagtgcagtgacggccagcggcaaaccagtcccacaaatgacactgacccgcagtgatggtgaccgccatcagtttgctattgccgaccgtggggcttataccggcgtaacggcaaaatggctgcacaccaaagacccgaagccgcaaaagcagaaggtcacgctgaaacgtaaaccaaaagagaagcacctgcgcgcactggaacaccctaaagcaaagccgatcagcaaaaagacaaaggcccaaaaagagcaggaagcgcgcgagggtgagtatatggctggtgaggccgataacgtgctggctctgacgacggtctacgcttctaaggcgcaggcgatgcgcgccgctcaggcaaagtgggataagttgcagcgaggcgttgcggagttttcaattacgctggcactcggtcgggctgatttatttcctgagacaccagtatgtgtatcgggctttaagcgtgtcatagacgagcagtcatggctaatcagcaaagtaacacacaatctgaataatagtggcttcacgacggggttagagcttgaggttaagctctccgatgttggctatgagtcactgttagaaaactgacgaagtgttactaatgctttaaggctgcattaacctccatagttcgacatgtcctttgactctagaacacattagccatccccgctattgcggggattttttatagtaaaaagtcatcgatcacattcaagaattgatatctatcagataattagtagattattttaaacatcgttaaatgcaatggtctcgcaatggaaaaagtaataattaaacttgataggcgctgggagttagcagagtttgcggtatttacgaaagagtatctgcaattatatggtttcttttacgccttacaatcccgttcaaaagaggttacaagtccaactgaaaaggatggtgaggtatggggatattctacgatgccctgggaaggcggtcacagtgttgtgaattttttcagaggggtttacacctcgacgccaccggaatatcgccctgtagtgaagaaaattcagtatgcctctcccggctttatagagctttccgcactcactgacattgcctggcagattgcagaacttgttgctgccgtcgctgcaagcatccttacagccaataaagtttacgatcgagtaatgcgtacatacaggcaaagagagtgggcaaaactaaaatctgacaagctacgcctgcagaaccaagaacgtgaaattcaactcgtagccaactctgtgaaagcgcttgaaaaggttatggggctgagtgaagaacaacataaatatcttgtccggctttcaggcgcagacgaactggtacaactaaagatgctactagctgtattcagaagagcgacccctcttgccgagcttcaagaaagtggaaaggctgactttaagggtgagaacgataaagatggtaaagcaccacaacataaaaactaaaaaaaacaagtcaaaacttgcaaatgcaacattaaggtttatcatccccataaacatgccagtcggggaaaaaactatgatgcattgcccgttatgccaaaatgccgcgcatgctcgcaccagtcgatatctgagtactgaaacgaaagaacggtaccatcaatgccaaaacatcaactgcggttgtacatttatcacattcgaaacgctctcgcgttttatagtaaaaccgggggctgttgatccagcgcccccccaccctgtcagaaaccagcaacagcaactctggctttaaacctgcttcggcaggttttttttatatctgtcgccatcgcaccaatctctgccgccaatttgccgccaccaccaataaaaaaggggtcagcaattcgctaaccccttgttttacaacacgctttggatgtagcgtgaatgcgttatcagttaagacgctctttgatacgagccgctttaccagtacgctcacgcaggtagtacagtttagctttacgaacagcaccacgacgtttaacagcaatgctgtcaactaccggagagtgagtctggaagacacgctcaacgccttcgccgttggaaattttacgaacagtgaatgcagagtgcagaccgcggttacgaatagcgataaccacgccctcgaatgcctgcagacgtttcttggtaccttcaacaacccatactttcacttccacggtatcgcccggacggaaggaaggtacgttctgcttcatctgctcttgttcaagttgcttaataatgttgctcataatttaatctcttatcctgggtaaactgatattcgggggcctatgccatcccatcatgtttatgctgctgttgtgcgtgttctgttttgaactccgccagcaaccttgcttgctcttcagtcagagccaggttttccagaagttcaggtcttctaagccaggttcggcccagcgactgtttcaaacgccagcgacgtatctcagcatggtttcccgacagcaatactggcggtacttccatcccctctaacacttcagggcgcgtatagtgcggacaatccagcaacccatcagcaaacgaatcttcgattgctgatgcctcatgccccagaacccccggtataaaccgggcgacggagtcaatcagcgtcattgccggtagttcgccaccgctgagaacgtaatcgccaattgaccattcttcgtcaatttcggtctgaattacgcgctcatctacgccttcgtagcgaccacacaccagaataagcttctgattcgtggccagctcgctaacgcccgcttgatcaagcttgcgtccctgaggcgacagataaatcactttagcgccttcacctgccgcggcttttgctgcgtgaatggcgtcccgcaagggttgcaccatcattaacatccccggtccgccgccgtaaggacggtcgtccacggtacggtgccggtcatgcgcgaagtcgcgaggactccagctttggatgttcagcaggcctttttttactgcccggccagttaccccgtaatcggtaattgcgcggaacatttcaggaaacaggctaactatgccaataaacacaagccaatccccataacgccatttattaccgtttattcggtggtttaaaaaccaggatcccagtctacttcgatagtacgagtagcgagatcgactttcttgataacctgcccatcgaggaacggtactagtcgttccttgataccaaatgcatctttcaggttcgccttaatgacgagaacgtcattcgacccggtttccatcatgtcgataactttaccgagatcgtagccttcagcggtgactacctggcagcccatcaggtctttccagtagtagtctccctcctcaagcgcaggaagttgcgaggaatccacgacaatttcgcaattggtcagaagattcgcggcatctcgatcgtcaacgcctttcagcttgatgatcagatcctgattgtggtgcttccagctttccagctgtacctgctgccactgacccgccttctggataaaccagggctgatagtcaaaaatgctttcggcgtcttcagtggaggaaaacactctgagccaaccacggataccgtatgaagaacccattttccccagtacaaccggttcagcgggtacttgtgcggcgagttgcttgctcatcatgaccaccgtgacagattaagctgctttttttacttctttgatcagcgccgcaacgcgatcggaaatggttgcgccctggccaacccagtgagcgatgcgatccagatccaggcgggtgccttcttctttttcgctagcgattgggttgaagaaaccaacgcgctcaatgaagcgaccgttgcgtgcattacggctgtcggtgacaacaacctggtagaacggacgctttttagcgccgtgacgagctaaacgaatagttaccataacatcctcttgtgtgaataaaacaaccgggccccatcgaggaacggagcccggcgtcatattaaaagcccgaaaattttactgatttctgggaaaaaagcaatcaacatgtgatgaagcttgattccagggcgtgaccgttgcagccagtttggcgtcggcgtgcgcgcagaaagcggagcgtacacgcagtacgtgagcatttactcgctccgctcgcccttcgggccgccctaaagggcgttcaaaacactatcgtgttttgtcgagcacactccggcgtcaaaatggcaaataaggtagcccgatatatttatctacccgggaagcctggcggcatcatccccttcatactccgcatcatcttcgccatcccgcccttcttcatcttcttcatcatgcgctgcatgtcgtcgaactgtttcagaaggcggttaacgtcctgcacctgcatcccacagccctgcgcgatacgacgcttgcgggaacctttgatgatttccggcttcgcgcgttctttcagcgtcatcgaattgatgatcgcctccatacgcaccagcaccttgtcatccatctgcgatttaacgttgtccggaatctgccccatgcccggtaatttgcccatcagactggccataccgcccatgtttttcatctgtttgagctgttccaggaagtcgttcaggtcgaaaccgtcgcctttcttcagtttggtcgccagcttctcagcctgtgcgcggtcaactttgctttcgatatcttcgataagagacagtacgtcgcccatgccgagaatacgcgaggcgatacgatccggatggaatggctccagcgcgtcggttttctcgccgacaccgaggaatttaatcggcttgccggtgatatgacgaatagagagcgccgcaccgccacgcgcatcaccatcaactttggtcagcaccacgccggttaacggcagcgcttcgttaaaggcttttgcggtattcgccgcatcctgaccggtcatcgcatcgacgacaaacagcgtttctactggcttgatagaagcgtggacctgtttgatttcgtccatcatcgcttcgtcaacatgcagacgaccggcggtatccaccagcagcacgtcgtagaatttgagcttcgcttctttcagcgcggcgttgacgatatcaaccggtttctggccgacatcagacgggaagaaatccacgccaacctgctcagccagcgtttcgagctgtttgatcgccgccgggcgatagacgtcggcagagacgaccagcactttcttcttgtgcttctcgcgcaagaatttacccaacttaccgacgctggtggttttacccgccccctgcagacccgccatcaatactacggctggcggctgcgcagctaaattcagcgtctggttctcttcgcccatcgccgcaaccagttcgctacggacaatcttgacgaactcctgccctggggtcaggctcttgttaacttcatgaccaaccgctttctcttttacgcgattgatgaactcacgcactaccggcagcgcaacgtcagcctccagcagcgccatgcgcacttcgcgcagcgtctctttaacgttgtcttcagtaaggcgcccacggccactgatattgcgcagcgtgcgcgacaaacgatcggttaaattatcaaacattgtctctcgcctggggtggaaacggttggtcgccgcagcgacacagttacagaatttcgccacagtataccatgaagccgtctttgttgttatgcaacggttggagctgcggtcacgtaacgctatactgcttctctttctcactggtcaactgtcgacacaactatgcccgtttttgctttacttgcccttgtcgcctactccttcagcctcgcgctgatcgttcccggactgttgcaaaaaacagcggctggcggcgtatggctattctttctgcggtcatcgcgctggtgtgccatgctgtcgcgctggaatcgcgtattctgcccggcggcgacagtggacaaaacctgagcctgctgaatgtcggttcgctggtcagcctgatgatctgcacggtgatgaccattgtcgcgtcgcgtaatcgcggctggctacttctgcctattgtctatgcttttgcgctgattaacctggccttcgccacgttcatgcctaatgaatatattacgcatctggaagcgaccccaggcatgatggtgcacatcggtctgtcgcttttctcttacgcgacgctgataatcgccgctctgtatgcgctacagctggcgtggatcgactatcagttgaagaacaaaaagctggcgtttagtaatgaaatgccgccattgatgagcattgagcgcaaaatgtttcatatcacgcagattggcgtcgtactgctgacccttactctgtgtaccggcctgttttacatgcataacctgttcagtactgaaaatattgataaagccgtgctctctatcgtggcatggtttgtctatatcgttctgctgtgggggcattaccatgaaggctggcggggtcggcgggtcgtgtggtttaacgtcgcaggcgcgggtattctgacgctggcctattttggtagccgcatattacagcaatttgtaagctaagcttttaaaggagtttcccctggaacacatctccaccaccacgctgattatcatattaatcatcatggtggtcatctcggcctatttttccggttccgaaactggaatgatgacgctaaaccgttaccgtttacgccatatggcgaagcaaggtaatcgctcggcaaaacgggtagaaaaattattgcgtaaacccgatcgactgataagcctggtgctgatcggcaataacctggtcaacattcttgcctcggcgctcggcacgattgtgggtatgcggctttacggcgacgccggcgtggctatcgccaccggggtactgacgtttgtcgtgttagtttttgctgaagtcctgcccaaaactatcgccgcgctctatccggaaaaagtggcctatcccagcagcttcctgctggcgccgttacagatactgatgatgccgctggtgtggttacttaacaccatcacccgcctgctgatgcgtctgatgggaattaaaacggacatcgtggtcagcgggtcgttaagcaaagaggaattacgcactatcgtgcatgaatcccgttcgcaaatctctcgccgcaatcaggatatgctgctgtcggttctcgatctggaaaaggtcagcgtggatgacatcatggtgccgcgtaatgaaattatcgggatcgatatcaatgacgactggaagtctatcgagcggcagctcacccactcgccgcacggacgcattgtgctctatcgcgattcgctggatgacgccatcagtatgctgcgcgtgcgtgaagcctggcggttaatggccgagaaaaaagagttcaccaaagagatgatgctgcgcgccgccgatgaaatctattacgtcccggaaggtacgccgctcagtacgcaactgattaaatttcagcgcaataaaaagaaagtcggactggtcgtcaacgaatatggcgatatccaggggctggtcaccgtggaagatattctcgaggagatcgttggcgacttcaccacatcgatgtcgccgacactggcggaagaggtcacgccgcaaaacgacggttcggtcattattgacggtaccgccaacgtccgggaaatcaataaagcgtttaactggcacctgccggaagatgacgcgcgcaccgtcaacggggtgattctggaggcgctggaggaaattccggttgctggcacgcgcgtgcgcattgagcagtacgatatagatattctcgatgtacaggaaaatatgattaagcaggtaaaggttgtaccggtaaaaccgctgcgcgagagtgtggcggagtaacacaatggcgaactccggttcgccttttttatcgccgtcttttaagattccatcaattcctgccatttacttaacaatgcaataatgtcttttcaggcattcagaaaggatattgatgttatgtcagaagattatgtaattgaatgggataagaattttgcagacgacctcaacgtcgtcgccaacgtttttttatcacacaacccaaccttatggcccactattttctctcaactttcgacgcaacctgaaatctttgaagacgaagatgaagacgaatatgggttgcaggacgtcctggattgtagcggtggcgatctcggaaataacgagctggcacaggcatttttacaagttctacgcggcgaaggatttattcacctcgttgactggaaaggtgaagatgaagaaggcgaactggctaattttgccgcagatcgcttttatgaactcacaaaaaacctgacggattctgaggaattaagaaatcttcttgtcgaaataacccaagaggatgaaatctccgatgtctgtgaagccggggaccgttaccttgacgagatctttgaacgcatccagaccgaactcaataagaggggcttccagatttttgatctgaatgaaggatctgacacctataatgtggtcgttctgccaatgagcgaatataaaaaaatagaggacttcaacacgccgtggctggaagtgcaggattttttaagctaaaaaaatggccgactttacatcggccatcaaacttttacttcgccttcgctacagtcaccatcgccgcgcgaatggtacgaccgttcagcgtatagcctttctgcataatacccagcacattgcctgccggaacctcttccgactccaccatcgcaatcgcctgatgcacgttcgggtccagcggcacgttggtctcagcaatcacttccacgccgaatttacgcaccacatccagcatagacttcagcgtcagctcaatcccttcgaccattgccgccatatccggattggctttgtctgcgacttccagcgcgcgatccaggctatcgatgaccggcagcaattcgttgacgaacttctcgagagcgaatttatgcgctttttcgatatcctgttcagtacgacggcgcaggttttccatttccgctttgatgcgcaacacggtgtcgcgttcgcgagtctgggcttctgcaagctgaacttccagattcgcaattttttcatcgcgcggatccacctgctcagcagaatcgtttggttcaactgcctcaacctcttcgtgctgatccatgataatttcttccggggcttgcccctcaggcgttttctgttctttactactcatgaatttctccgcgtttttttcgcattcatctcgctaacttcgcttattatggggatcagattcagggtttcaagggaagtactcacattgtcatcaatcttcgctacaaggacctcagaaaaatgaataatcatttcaagtgtatcggcattgtggggcatccgcgtcatcccaccgcactcacgacacatgaaatgctctaccgttggctatgcgatcagggttatgaggtcattgtggagcaacaaatcgcccacgaattacagctaaaaaatgtgccaaccggcacgctggcggaaattggtcaacaggcggatctggcggtagttgtgggcggcgacggcaatatgcttggcgcagcgcgtacgctggcgcgttatgacatcaatgtgattggcattaaccgcggtaatcttggcttcctgaccgatctcgatccggacaacgccctgcaacaattatctgatgtgctggaagggcgctatatctccgaaaaacgttttctgctggaagcgcaggtctgccaacaggaccgccagaagcgtatcagcacagccattaatgaagtggtgctgcatccgggaaaagtggcgcatatgatcgaattcgaggtttatattgatgaaaccttcgctttttcacagcgatctgatggtctgatcatttctacgccgaccggctccaccgcctattcgctctccgcaggcggccctattctgaccccttcactggatgccatcaccctggtgccgatgttcccgcataccttgtcggcacgcccgttagtcattaacagcagtagcacgattcgtctgcgtttttcgcatcgccgtagcgatctggaaattagctgcgacagtcagatagcgctgcctattcaggaaggagaagatgtgctgattcgccgctgcgactaccatctcaacctgatacatcccaaagactatagctatttcaatacattaagcacaaaactcggctggtcaaaaaaattattctaattttacgttagcctctttactgtataaaaaaccagtttatactgtatttaattacagtcatggtttttcatacaggaaaacagctatgttggcgcaactgaccatcagcaattttgctatcgttcgtgagcttgagatcgattttcagagcggaatgaccgtcattactggtgaaaccggcgcgggtaaatctattgcgattgatgccctgggtctgtgtctgggcggtcgcgctgaggccgatatggtccgtaccggagcgacccgcgccgatttgtgtgcccgctttgcgctgaaagacacgcctgcggcattgcgctggctggaagaaaaccagcttgaagaaggtcgcgaatgcttacttcgccgcgttatcagcagcgatggccgctcacggggctttattaacggcaccgctgtgcccctgtctcaattgcgcgagctcggtcagttgttgattcaaattcacggccaacatgcgcaccagcagcttaccaaacccgaacagcaaaaatcgctgctggatagctatgccaacgaagccgctttagcgcagcagatggctgctcgctaccaattatggcatcaaagctgccgcgatctcgcccatcaccagcaacaaagccaggaacgcgccgcgcgcgcggaactgctgcaatatcagttaaaagagttgaacgactttaatccgcaggccggcgaattcgagcaaattgacgaagagtacaaacggctggccaacagcgggcagttgcttacgaccagccagaacgctctggcgctactcgcggacggcgaagacgttaacctgcaaagccagttatatagcgcaaaacaactggttagcgagctggtaggtatggacagcaagctttccggcatcctggatatgctggaagaagccactatccaactcaccgaagccagcgatgaattacgccactattgcgagcgtctggatttagaccccaatcgcctgtttgagcttgaacagcgcatcgctaaacaaatttcgctggcgcgaaaacatcacgtcagcccggaagcgctgccgcagctttatcagtcactgctcgaagaacagcagcagctcgacgatcaggccgattcgctggaaacgctaacgctggcggttaataagcatcaccaacaagcgctggaaacggcgcaagcgctgcatcaacagcgtcagttttacgcccaggagctggggcagttgatcactgaaagtatgcatttactttcgatgccgcacggtctgtttactatcgacgtgaaatttgatgagcatcatctgagcaacgacggcgccgatcgcgtggagtttaaagtgacgacaaacccaggtcagccgctgcagcctatcgctaaagtcgcgtctggcggtgaactgtcgcgcattgcgctggctattcaggtgattaccgcgcgcaaaatggaaacgccagcgctgatttttgacgaggtcgatgttggcatcagcggcccaaccgccgccgtggtcggtaaactcctgcgtcagcttggcgaatccactcaggtgatgtgcgtcactcacctgccacaggtagccgggtgcggtcaccagcacttctttgtcagtaaagaaacagacggggcaatgaccgaaacccatatgcaacctttggataaacgtgcgcgtttacaggaactggcccgcctgttgggaggaagtgaagttacgcgtaatacgctggcaaacgcaaaagaactgctggcggcgtaaacttttttatctcccgaaggtctgagttcacaacaaaaacgccgtaagacccgacagcaaaaggttttaaagtgatgaaaggtctattatcatcggcatattaatatgagccacgtactgctcaggcccgaaaaggaacccaatcactatgcgctgtaaaacgctgactgctgccgcagcagtactcctgatgttgaccgcaggctgttccactctggagcgagtggtttaccgacctgacatcaatcaggggaactatcttacacctacggatgtcgccaaagtgcgtgttggtatgacgcaacaacaggttgcgtatgctttaggcacgccgatgatgaccgatccttttggtacgaacacctggttttatgtcttccgccagcagccaggacatgagaacgtgacgcagcagactctgacgctcacctttaacagcagcggcgtgttaaccaatattgataacaaaccggcgttgacgaagtaattttgtgataccgcctgatgaggttacgttcatcaggcctgcaaacctctcccccgccatttggtacgaatttgcctgatggcgctacgtttatctggcttacaggcacgcctgtgcttcaggtgtggtacggctttcacaccgttatccggcaaaagaggctaattatctaccagccgatttttcggcgcgctggcggcgtaatgcttttggatcggcgattaagggacggtaaatttcaacccgatcgccatcctgcaccgtatcggtgagttttaccggacgactgtagatacctactttatttttcgccagatcgatatccgtgcgcaattccagcaagccggaagcgcgaatcgcctcttcgaccgtcgcgccctcctccagcgttacgcgctgcaaatactgcttttccggcagcgcataagccacttcaaccacaagtttatccggcacggtaaacctctttggcgcgaaccgtaaacgcctgcaccatgttggacgctaactctttgaatatacgaccaaacgccagctcaatgagtttattggtaaactcaaaatcaagctgaaactcaatacggcacgcctcggggctgagcggggtaaatttccagccgccgatcagctttttaaaggggccatccaccagatgcatcagaatgctctggttacgcgttagctgattacgcgtcgtaaacgtcttgctgatacccgccttcgacacgtcaacagccgccgtcatctgtgctggcgatgactccaggacgcgactaccaacacacccaggcaaaaactggggatacgattgcacgtcattcactaactgatacatctgttccgcactgtaggggactaaagcagtccgactaatctgaggcatagcaattcccatcaacataaatcgtgtaaataataccacttatcagcgagtaaaaaaaatgctgtccccaaccgtcatgccttaattgtgcgtgcatagcccaactcatgctaagatagatttttgcacctcatcaggacgtaatggggtgttttcgatatcagattacctatgaattcacgacacttatgacgaagaaaaaagcacataaaccgggctcagccaccatcgcgctgaataagcgcgcccggcacgaatactttatcgaagaagagttcgaggctggtctcgccctgcaaggctgggaagtaaaatctctgcgcgcaggaaaagccaatatcggcgacagttacgttatcctcaaagatggcgaggcctggctgtttggcgcaaactttacgccgatggcggtcgcctcgacacatgttgtatgcgacccaacccgaacccgcaaactgttgttaaatcagcgtgagcttgattcgctgtatggccgtattaatcgtgaaggttatactgtcgtcgcgctttctctgtactggaaaaatgcctggtgcaaagtgaagatcggcgtggcgaaaggtaaaaaacaacatgataaacgttccgatcttaaagaacgtgagtggcaactggataaagcacgcattatgaaaaatgcaggccgataatagacattttttgtgaccagcttctcagtatgaagctggtcaatgttcatatctcatgcatgcctcgaaaatatattctctgtgtctgacgcttatcaatagcaataaataccacaacaagaatatattctttgtttaaaaatttttatagtctaataacacaatacttcaaatgatttttataaaatttaatattgctgaataccttcacaaaaagtattgtttttatgttaaaagagaaaaagaagaaaaaattaaaattcattataaaacataaagataaataaaaaattatcatgtattgttagcccaccctacatctccttaacacaaactccgttatatttcagacgcactaacacctttatcaatagatcttaatttgcagaaagatttttttctgactatatcatctaatacgaaagcactagtcaggcacaaaaaacaaagggttattcggcgagaaaaccagacctccacctacgctcataaaaaagaatatggctacggaaattcatctctcacgatgaacgggaaggctcgtctacgcattttgccctgaacgttgtgcccgttaattaatacacagagcaaatccatcaggagctgatttatgcgtctactcgccgtggtttcgaaattgactggcgtctccaccactgtggaatcctcagcggtcactcttaacgccccgtcaattgttaaattatcagtggcccgggaggaaattagtcaacttacgcgcattaatcaggatctggtggtgaggctccattccggcgaaacgatcacgattaaaaacttttacgttaccaacgatctgggcgcaagccagttagtactggcggaaaacgatggcacgttatggtgggtagaaaatccgcaagccgggctacattttgaacaaatcgctgatattaatgagctgctggtcacttctggcgcttcccatgaagcaggcggcgccgtttggccgtgggtactggctggcgcggtggcggctggcggcattgccgctatcgcgtcttccggcggcggcgattcccaccatcattcggatggcgataatccgccccccgataacaccaatcctgacggtaatccccctgataacagcaatcccggcggcagtacccccaacggcaatactccaggtagcagtaatcctgtagatactaccccgcctctcgctcccggcgaattattgatttcagcggacggaaaaacggtaagcgggcaagccgaagcgggcagtaccattaccatcaaagatccctcaggcaacgtcgttggcgagggcaaagcggatagcgacggtaaatttagtattgatctgacagcgccacagattagcggcgaacaacttaccgtgaccgcgactgacgatgccggcaataccggcccatcggcaaccattgatgcgcccaacattcctctccccgatacaccggttatcaccgccgctatcgatgatgccgctcccctcaccggcacgctgagcaataatcagtttacgaacgacaatacccccactctggagggcaccggcagcgcaggcacagtcatccatatttacgccaatggtcaggaaataggctcaacaacggttgataccagcggaaactggcattttgccattaccagcgcgctagcggatggggaaaatcatttcaccgccattgcgactaacgtgaaaggcgaaagtagcgaatcagcccgctttacgctgactatcgacacactcatccccgatgccccacgtgttgaactgattgccgataacaccagtttgctcaccgggccgctacagaataatgaccgaactgacgaggcaaaaccgctattttccgggcagggagacgcaggcaataccatcacgattaaagaaggttcaaccgttatcggcagcgctaccgtagacgaaaatggacgctggacctttacgccgactacgccgttaagcgatggcgaacatacctttaccgtcgaacaaagcgacaaagccggaaacacgagccgcgtgacgacaacgcctactatcattgtggacaccacgccgcctgacgccgctatcattgataatgttgcgaaagacggcacaaccgttagcggcaccgctgaagctggcagtactgtgtcgatctatgacccggcgggaaattacctgggctccacgattaccggagaaaataaccacttcagcatcacgctgaatccggctcagacccacggcgagcgtctggaagcgcgtattcaggacgccgtcggtaacatcggccccgccacggagtttaccgcttctgactcacagtatcctgcccagccgactatccttaccgtgacggatgacgctggcgccgttaccgggctgctgaaaaatggcgatgccacagatgataaccgcccaaccctcagcggtactgctgaaccaggcagtacgatatcgattaacgataatggctttcctgtagcgacctttccgcccattgtcgctgacgctgacggcaaatggagctttaccccctcgctggcgcttgccgatggcgaccatgtctttaccgctaccgcgaccaacgatcgcggcaccagcgggcagtccgtctcctttaccattgatatcgacacgcagccgccggtgctggaaggcctggcggttagcgacgtcggcgacagactcaccggcactacggaagctggcagtactgtggttatcaaagacagcctgggaaatacgctcgggagtggaacggcaggcgacgacggtaccttctcaataggtattagcccggcgaaaattaacggcgaaacattaagcattagcgttaccgataaagccgcgaatagcggtccggtagaaacgctgaacgcgccggataaaactgcgcctgcggcaccggacggtcttaccgtggcgaccgacggtctgtccgtaagcggtcaggcggaagccggggcaacggtcactatccgcgacagtagcaacaccgtacttggcagcgccgtcgctaatggcaacggacaatttatcgttccgctgaatacggcgcagactaacggccaggcacttatcgctaccgccaccgatgtcgcgaaaaacgaaagcgccgccgcgacggttatcgcgccggacagtaccgcgccggaaatgccgaaaaacgtggtaattagtgaggatggcaccagtatcagcggcaccgccgaaccgggtagcgccatcacgatcgccacgccggacggcaagccgcttggcagcggcaaagcagatggcgaaggtcattttacccttcccctcgtccccgcacagaccaacggcgaacaggttaccgtcaccgccaccgacagcgccaacaacgtcagcccgccaaccacagcgcaagcgcccgatatcaccgccccggataagcccattatcactcaggtactggacgatgttgaaagcttcaccgggccgctggttaacggacaaaccaccaacgacaaccgtcccacccttagcggtacggcggaggccggcgcgcgtgtcgaagtctttgataacggcttttcactgggactcgccacgctacagcccaacggtgcctggacgtttacgccgtcgcaaaatttaggtgaaggcgcgcatcgactgaccgtaatcgcaaccgacgctaaaggcaatgccagtcaggccgcgtcattcgacctggtggtcgatacgcaatcgccgcagcaaccggtaatcaccttcattacagatgatgcgccgggtattctcggtagcgtcgcgcatctggggctcactaacgacagcacgccaacgattaatggtacaggtgaaccgggttccacagtacacctgtatcagaatggcgcccggatagcagatattatcgtcggtaattccggcgtctggagctacgcttacaccacggcctcgccactggcggacgacacctacacctttaccgtgacggccagcgacagtaacggcaacaccacgcctttttcgaccgattttacgattaccattgatacccaggcccctgccgcccccggcgttatcggcgtagctgacggcgacggaaatacgattgataccaatcagattacccaggaatcccagccccggttgagcggtagcggcaccgcaggcgacacaatcatcctttacgataatggcaatgccataggtcaggcgctggtcggcacggacgggcgctggcagtttacgccgcctgccgcgctgggcgacggcgaccaccttctgaccgctcgcgccaacgatccggcggggaacgaaagtcccgaatccatcagctttaccctacgcatcgatacccaggcgccggatgcgccgcagatcgtgtcagccgccatcaccggcggagaaggcgaggtgctactggcaaacggcagtattaccaatcagcgtatgccgaccctcagcggcaccggcgaacccggcaccatcatcaccctgtacaataacggcgtagaactggctaccgtccaggtcaatccacagggtagctggacctatccgctaacccgtaatctgagcgaagggttaaacatcctgacggccaccgccacggatgccgcaggcaatagtagcccgacctccggcgttttctccgttacccttgatacccagcctccagcgcagcctgacgcgccgctaatcagcgataacgtcgcgccggttattggcaacatcggcaataatggcgcaacgaacgataccacgccgaccttcagcggcacgggagagatcggcagcacgataattctctacaataatggcagtgaaattggtcgcacaacggtaggcgataacggtagctggaactttacgcctgcggcactgacgccagaaacctataccattaccgtcacggaaaccgatagagcgggcaatatcagtccaccttccgcctcagtcacttttacgctagacaccactgcgcccgccaatccggttatcacttttgccgaagataacgtcggcgaagtccaggatactattgtcagcggcgcaaccactgacgacaatacaccggtcattcacggcactggcgacatcggcagcattattacgctctataatggcagcagcgttttaggcgtagtcaccgtcgatgagaccggcacctggacgctgccggtgaccagcgcgttgccggatggcgtctacaccctgactgccattgccgccgatgccgccggaaacagcagcggcgtatcgaacagctttaccttcaccgtcgacaccgttccgttgcagccgcccgtcgtcaatgaaatccttgacgatgttgcaccagtgaccgggccattaaccgatggcgcctttactaacgatcggacgctgactattaacggcagcggcgaaaacggcagcaccgtcacgatttacgacaatggcgtggcaatagggacggcgctcgtcaccgacggggtctggacattcaatacgcccgaattatcagaagccagccatgcgctaaccttcagcgcgactgacgatgctggaaataccacggcgcaaacccagccgatcactattaccgtggatatcaccgccccgcccgcgccaacagtccagacggtggatgacgatggcacgcgcgtcgccggaattgccgacccttacgctaccgttgaaattcatcatatcgatggcaccctggtcggcagcgctgtcgctaatggcaccggtgaattcgtcgttacgctcagtccggcgcaaaccgatggcggtacgctgacggcaattgctatcgatcgcgcggggaataacggcccggctacgaattttcccgcttccgacagcggtctgcccgccgtcccggccatcacggcgattgaagatgatgtcgggagcgtacaggggaatattgcggcgggcggcgccacggacgacaccacgccgacgctgcgcggcaccacggatatcggctctaccgttgaagttttcattgatggcgattcggcaggctttgccaccgttgacgccagcgggaactggatctttgagatcgcgacgccattaagcgaaagcacacattacttcaccgtccaggcaaccaatgcgaatggcccgggcggcctgtccgcaccggtcgggatcactgtcgatcttagcgcgccggcgcaaccggttattaccagcgcaacggatgatgtccccggcatgaccggtacgctggataacggcgcgctcaccaatgattcacgcccgacgctcaacggaacgggagaagctggcgccacgatccgcattctggataacggcgtagaaatcggttccgccacggtagatcaaagcggcaactggcgcttcaccccgaacgcgccgctggagagcaacgcgcacatctttaccgccgtagcgaccgatcccgccggcaatagcggccagccttcggacggctttacgctgaacattgacgcgcaggcgccagatgtgccggttatcacctccgtgattgacgataacaatcaaccgaccgttccggtgttaccggggcaatccaccgacgatcggcagccaatactgaacggaactggcgaacctggcgcgacaatcaccatttttgataacggtacgccgcttggcacggctcaggtaggcgaaaacggtagctggaccttcccggtgccccgcaatttgtcagagggaagccataatctgacggttagcgctaccgatccggcgggcaataccagcgcggtctccgcgccgtggacgatcgtggtcgatattacgcctccggcgatcccggttctcacctccgtcgtggatgaccagcccggaattaccggcaacctggttagcgggcagctaacgaacgatgcgacgcccaccctgaacgggcgcggagaggcaggcgcgacgattaatgtctatcttgacggtaatcccgcgtccatcggtaccacgacggtgaatagcgacggcacgtggagtttcacgccgcagacgccgcttgcaaacggtagccacacgttcacccttagcgccaccgatccggcgggtaatagcagcgcggtgtccagcggatttgtgctgacgattgacgccacaccgcccgccgcgccggttatcgccagcgtggcagacaatacggcgccggtaacgggcatcgtccccaacggcggctcgacgaacgaaacccgaccaacactctcgggtaccggtgaggcgggtacaaccatctcgatttataatggcagcgcgctggtcggcacggcgcaagttcaggccaacggtagctggagctttacaccgtctacctcgctgggcgcgggcgtctggaacctgacggcgacagcaaccgatgcggcaggcaataccagcgccgcgtccgaaatacgctcgtttactattgataccacggctcccgccgcgcctgttattgatacggtctacgacggtacgggccccattaccggcaatctgagttcaggacagatcacagacgaggcgcgccctgtcattagcggcacccgtgaaaccaacacaactattcgtctctacgataacggcacgctgctggctgaaattcccgccgacaatagcagtagctggcgctacacgcccgacgcctcgctggcgacgggcaaccatgtaattaccgtcattgccgttgatgccgcaggcaacgccagccccgtttcggacagcgttaatttcgtcgtcgatactacgccgccgctgacgccggtaatcacatcagtcagtgacgatcaggcgccaggcctcggcacgatcgcgaacggccaaaataccaacgatcctacgccaaccttcagcggcaccgcagaagccggcgccacgatcacgctctatgaaaatggtacggtcattggcacgacaacggctcagcctgacggcgcgtggagcgtctccacctcaacgctggcaagcggaacgcacgtcatcaccgccgtcgccaccgatgccgcaggaaacagcagcccgaacagtacggctttcaccctgacggtcgataccaccgcgccgcaaacgccaatcctgacgtccgtggtggatgacgtcgcgggtggggtcacaggaaatctcgctaatggtcagataaccaatgataaccgccccacgctgaacggcactgccgaagcgggcagcgtggtcagtatctatgatggcgacactctgcttggcgtcacctcggctaacgcgagcggcgcgtggagcttcacgccgacgacagggttaaacgacggcacgcgcacattaacagtgaccgccaccgacccggcaggcaacgttagcccggccaccagcggttttactatcgtggtcgatacccttgcgccaacggttccgcttataaccagcatcgttgatgatgtcccgaacaacaccggtgccattggcaatggacaatcgaccaacgacacacagccgacgctcaacggtactgcggaagccaacagcgcggtaagcatcttcgataatggcgcgctggtcgcgaccgtgaacgccaatgccagcggcaactggagctggacgccaaccgccgcgctcggccagggaagtcacgcctatagcgttagcgccgccgatgcggctggcaacgttagcgccgcttcgccatcgataacgattatcgtggataccattgcgcccggcgcgcccggcaacctggtcatcaatgctaccggtaatcgcgtgacgggcaccgcggaagcaggcagtacagtgacgattacctctgagactggtgtggtactgggaaccgccaccgccgacggtacaggcagcttcaccgccacactcacgcccgcgcagaccaatggtcagccgctactggcatttgcccaggataaagcaggcaacacaggcattgccgccggatttaccgcgcccgatacgcgcgtgccggaagcaccgatcatcaccaacgtagtggatgatgtgggtatttataccggcgctatcgccaacggccaggtcactaatgacgcacaacccacattgaatggtaccgctcaggcgggcgccacggtgagcatttataacaacggggcgctgctcggcaccaccacggcgaacgccagcggaaactggagctttaccccgacaggcaatttgaccgaaggcagccacgccttcaccgccaccgcgactaacgccaacggtacaggcagcgtctccaccgccgcgacggtgattgtcgatacgctggcgcccggtacgccgtcaggtacgctcagcgccgatggcggttcactttccgggctggcagaggcaaacagcaccgtaaccgtcacgctgacggggggcgtgacgctcaccaccaccgctggcagcaacggcgcatggtctctcaccttgccgacaaaacaaattgaaggtcaactcattaacgtgacggcgactgacgctgcgggtaacgcctctggcacgttaggcattaccgcgccggttctgccgctggcggcaagggataacataaccagtcttgatctgacctctaccgccgtcaccagcacgcaaaactattcggattacggcctgctgctggttggcgcgcttggcaatgtcgcctcggttttgggtaacgataccgctcaggttgagttcaccattgctgaaggtggtacgggcgacgtcaccatcgatgccgccgcaacgggaatcgtgctttcgctgctcagtactcaggagattgtggtacagcgctacgacaccagcctcggcgcctggacgacgatcgtcaacaccgcccttggcgacttcgcgaatttgcttaccctgaccgggagcggcgttaccctgaacctgagcggcctgggcgaaggccagtaccgggtactcacttataacaccagtctgctcgctaccgggtcatataccagcctggatgtcgatgtacaccagaccagcgcaggtattattagcgggccaaccatcagtaccggcaacgtcatggctgatgataccgcgccgacgggcaccacggtcaccgccatcaccaacgccaacggcgtcagtacgccggtcggcgcgggcggcgtggatatcctggggcaatacggcacgctgcacattaatcaggatggcagttacacctacacgctgactaagcccacggcgggatacggacataaagagagcttcacctacaccatcacccagaatggcgtcggtagcagcgccgcgcaactggttattaatttgggtcccgcgcctgtaccgggcagcgtgatagcgacagacaataacgcctcgctggtctttgatactcacgttagctacgtcaacaacggcccctcgacacaaagcggcgtcacggtattaagcgtcggacttggtaatgtactgaacgcgaatctgcttgatgatatgactaatccgatcatctttaacgttgaagaaggcgctacgcgaaccatgacgttacagggaaccgtcggcggcgtctcactggtttccacgttcgatctgtacgtttatcgcttcaacgatgccattcaacaatatgagcagttccgggttcaaaagggctggattaacaccctgctgttagccggacagtcccagccgctgaccctgacgttgcctggcggcgaatacttgttcgtgctgaataccgccagcggcattagcgtcctcactggctatacgttggcgatttcccaggaccacacctatgccgttgacagtatcaccgccaacaccaccggcaacgtactgaccaatgatgtcgtccctacggacgccctcctcactgaagtaaacggcgtggcgattgcggcgaccggcacaacggaggtaaacgggctgtatggctcgctcatcattgacgcaagaggcaactatacctacacgctgaagaacggcgtcggcgccgacagcattaaaacgccggacagctttatctatacggtcaaagcgccaaacggcgataccgatacggcctcgctcaatatcacgccaaccgccagggcgctggatgcgattaatgatgtcagcgataccctcagcgtcgccacgcttcaggataccgctgcctggctggactccagcgtcggcagcgccagttgggggctactcggcaaatcgggcagcgggagcggcacctttgacgttgcaacgggcaccgtacttaaaggcgcgtcactggtttttgatgtctccacgctcattacgctgggcaatctgaatattagctgggccattcaggagaacgggaccgtcatacgcaacggaaccgttccggtggcgaatatcacgctgggcagcgcgacggtgaccgttaacctgagcggcctggagctggatgccggaacgtacacgcttaactttaccggcaccaataccctggccggggcggcgacgatcacgccacgcgtcatcggcaccaccgtcgatctggataattttgaaacgtccggaacgcataccgttctcggcaatatttttgacggcagcgacgcggcgggggcgatggatcagcttaatacggtgaatacccgcctgagcattagcgggtataacggcagcgccgccacgctggacgccgcggcgaataccaccagcgccacgattcagggacattacggcacattgcaaattaaccttgatggcgcttacacctacaccctgaataatggcgtcgcgatgtcgtccatcaccagtaaagaggtctttacctatcaactggatgacaagatgggtcatacggatagcgccacattgaccattgatatggcgccacaaatcgtcagtaccaaccaaaacgatgttctcatcggctccgcctatggcgatacgctgatttaccacctgttaaacggcgcggacgcgaccggcggcaacggcgtcgatcgctggcaaaacttctctaccgcgcagggcgacaagatcgatatccacgaactgctgaccggctgggatcaccaggcggcgacgctgggtaactttgttcaggttcataccagcggcgccaatacggtgatatccgtcgatcgcgacggcaccggcagcgcgtttaaatcaaccgaccttgtcactctggagaatgtgcagctcacgctaaatgatctgttgcagaacaaccacctgataaccagcggttgataaaaaagccccgaacgccacgacgttcggggcaacaagcggtgatatttaaaagggataaactatgggaagagtcgcgcctgtcgccatcgtactggcatttgctttgtttcatcaccagccccggggcgcagaagcgccgccaatgattacatccgaaggattagcaacggaccagatgcttccttcgctggatggctccgccgctgagttgccgctcagcgccgccgcgccgggcaacctgacgctcaatgacgcggtcaatcgcgccgttaactggcatccttctattcgcgaagccatcggcaaactgctcgcacagaatgaacaaatagaggtcgccaaatcgaaatattatccgcaagtcagccctggcgtgaacaatgggtacagcaatacctacaccgatcacgggtatagcccctcgctagtgctgtcggtatcgcaaatgctttatgacttcggcaaagtggcaagccaggttcgcgccgaaaccgcaggcgcagcgcagcaacaggccaatgtgttgctcagtattgataccgtcgcgcacgaaaccgccaacgccattgtacaaacgcagagctggcagcaaatggtagaagcggcggaagaacagctcgtcgcgctggacagcatcggtaaacttatccggcagcgcagcgatgaaggcgctacgtcgctctctgacgtggtgcaaaccgaagccagaatcgaatccgcccgctcgcaactggcgcagtatcaggccaatctcgacagtgcgaaagcctcactgatgagctggctgggctggaattcgcttaacggcatcaataatgacttcccggcgaaacttgctcgcagctgtgagacggcgactcccgacgatcgactggtgcccgcggtactggccgcctgggcgcaggccaacgttgcgcgggcgaatctggactatgccagcgcgcaaatgacgccgacgatttcgctcgaaccttctgtacaacattatcttaatgataaatatcccagtcatgaagtgctggataaaacccagtattccacctgggtaaaagttgagatgccgctttatcagggcggagggctgactgcccgacgcaacgccgccagccatgcggtagacgcggctcagtcgaccattcagcgcacccggcttgatgtccgccagaaactgatggaggcgcgcagccaggcaatgagtcttgccagcgcgttacaaatccttcgtcggcaacagcagcttagcgaacgtacgcgcgaactgtatcagcagcaataccttgacctcggttcccgcccgctgctcgacgtgcttaatgcggagcaggaagtttaccaggcgcgttttgccgaactgcaaacggaaagccagttgcatcagttgcaactgaactgtctgtataacaccggcgcgcttcgtcaggcgttcgcgttaaatcatcgcagcattcaatccgtggagatccagccatgacccgcgccgcccccgatgtagaagaggtactcagtgagcgcgcgctaagccaatgggcgcaggccatcagctatgtcgccggtcattatcgcgttgcctgttctcccggttcaattcaggccaacgccccgtggcttaggggtaaaagcagaacgaccgccttaacgcagctcgcgcggcaggcgggtttatcctttcatgcgccggacatagacaaaacggcatttagtcagtggcgattgccgttggttgtcgagctccgggacgggcagttattggtcatcgaacatgttaatggcgaagaggcggtagacgtttttgtgattgaagaagagggtcagcgtaaccgcctgacgctcagcgagttattgccggagatcctctatgttgccgcgctacgcccgctatcggcgctcaaggatagccgcgtcgaccgctatatctcccgctttaaacccgactggatgcgcgagctggttctgcaggatattcgcccttatttaccggtaatggtcgccgcctttctgattaacgtgctgtcgctggccgggattgtgttctctatgcaggtttacgatcgggtgatccccgctcagtcatatcctaccctgtacgtgctctccttcggcgtgctggtagcggtgctgttcggttttctgctgcgtgaagcgcgtacgcacattatggacgtgctcggtaaacgcgccgatatgcgcatttccgatcgggtattcggtcacgcgttaaggctgcgcaacagcgctattccccgttccaccggcagttttatctcgcagttacgcgaactagagcagatccgcgagatgattacctcttcaacgctggcgaccattgtcgatctgcctttctttttcctgtttatgatagtcctggcgattattgccccaccgctggcatggatagcgcccgtggcggctctgctgatgatcctgccgggcgtcgcactgcaaaaaaaactggctgtcctcgccaaccaggccgcccacgaagcgacgctacgcaatgcagtcttggtcgaaagcgttcaggggctggaggatattaaactgatgcaggcggagaaccgctttcttcagcagtggaatagctatatccgtattaccggcgagtcgggtctacgcacccgcaaactcacgcaagggcttatcagttgggggatgtcggtacaaagtctggtgtatgccgcagtgattatgttcggcgcgccgatggttattgaaggcagtatgactaccggcgccgtggtcgccgcgtcgatgctcggctcgcggatgatcgcgccaatggctaacctgtgcggcgtgctggcgcgctggcagcaggtgaaagcggcgaagatgggtctcgacaacattatgcaactgcccaccgagacacagcatgacgatagcctgatacaccgcgacatcctccacgggcattacctctttgaaaacgctcagtttcgttaccataacgacgatcaacgcataccgttgcgcctcgtgcgtctggagatcatgccaggcgagcggattgcgatactggggcgtaacggtgcgggtaaatccacacttttacaggcgatggcgggcggcctggagatgattcagggagatgcccggcttgataatctcagcttgtcgcacatcgatatggcggatttacgccgcaacatcggctttcttagccagaacgcgcggcttttcttcggcaccctacgagagaacctgacgctcggcgcgccgcacgccaacgatgaacagatttttgacgcgctcgaagtcagcggcggcgccgtcttcgtcaggcggctggcaaaagggttggatcatcccattatggagggtggtaacggcctgtccggcgggcagcgtcagtccctgttgctggcgagaatgctgctgcgctcccccaatattgtgctacttgacgaacccagcgcctcgctggacgagcatacggaacgagagtttattcagcggttacatcagtggcttggcaatcgaaccctggtcgtcgcgacgcaccgggtaccaatactggagctggttgagcgtgtcgttgtcctgaaagaaggacaactggtgatggatgcgccaaaagcgcaggcgcttaacgcggatcggatgcaaagtcaccgtcgggagtggaaaaatgaaaatcaatcagcatgatgccgcgatggacgatcccgatattcagcgtgaacgggcgttttccggcgcgggtcgtattgttctgatctgctcactgttatttctcattctcggcatctgggcgtggtttggccgactggatgaggtttccaccggcaacgggaaagtgatccccagttcacgcgaacaggttctgcagtcgctggatggcggcattctggcgcagttgacggtgcgggaaggcgacagagttcaggctaaccagattgtcgcccggcttgatccgacgcgtctggcgtccaatgttggtgaaagtgcggcaaaatatcgcgcttcactcgcctccagcgcacggttaaccgcggaagtcaacgacttacctctcgccttccccgctgagctgaacggctggccggatctgattgccgcagagacgcgtctctataaaagccgccgcgcgcagctggccgataccgaagccgagctacgggatgcgctggcgtcggttaataaagagctggccattacccagcggctggagaaaagcggcgcggccagtcatgttgaagtgctgcgcctgcaacgacaaaaaagcgatttaggcttaaaaattaccgatctgcgctcacaatattatgtgcaggcacgcgaagcgttatcaaaagcgaacgctgaggtcgatatgctctccgccattttaaaaggacgcgaggattccgtcacccgccttaccgtgcgttcaccggtacgcggcattgttaaaaatatccaggtcacgacgattggcggcgtgatcccgcctaacggcgagatgatggagatagtgccggtagacgatcgtctgctgattgaaacccgcctttcgccgcgtgatatcgcctttattcatcccggccaacgcgcattggttaaaattactgcttacgattacgccatttacggcgggcttgacggcgtggtggagaccatttcaccggataccattcaggataaagtgaaaccggaaattttctactatcgcgtatttatccgcacccaccaggactatctacaaaataaatcaggacgccgtttttcgattgttccaggcatgatcgccacggtagatatcaaaaccggtgaaaaaaccattgtcgactatttaatcaaaccgtttaatcgcgcgaaagaagcgctgcgcgagcggtaaatcgttgaagataagaagatacgggggctggtcacgcgtgtcacaagtctgttatacttaccttacacattggggctgattctggattcgacgggatttgcgaaacccaaggtgcatgccgaggggcggttggcctcgtaaaaagccgcaaaaaaatagtcgcaaacgacgaaacctacgctttagcagcttaataacctgcttagagccctctctccctagcctccgctcttaggacggggatcaagagaggtcaaacccaaaagagatcgcgcggatgccctgcctggggttgaagcgttaaaacgaatcaggctagtctggtagtggcgtgtccgtccgcaggtgccaggcgaatgtaaagactgactaagcatgtagtaccgaggatgtaggaatttcggacgcgggttcaactcccgccagctccaccaaataaaacaaggggttacgtgaaaacgtagcccctttttctttggtagtggcggcaaaatggcgacagcgtgtcggactggcggcaacaaaaaacccgccattaaagcgggttctgttcagaaactcatgtggccttgaccaccttttcccggatgtggtggcgcagaagaaattagattcggttttataatgtgccgtacaaacgtttcatgagtaacgaacgtacagccacaatttatattttggcactggttgtaacgttcttttgtcgtagctgatacctgaaagctgcttctggtatgtgctgcatgaccgcactctggacagttcatcattgctgttatcccaccacttttgccataatcgcaataatgatacatcattattcaatattaagaaccaatcattcaatttcaagaccatcaatctttacttcaagctccatgctggtcgtaaatccattatccgggctgacagaatgcgtcagggtggtaatggtccattctgcatcatcaatcggctgcttaaatcccgtcaccttcaccggcatttccgtatagagatcagcccgcccctcagcgagctgcagggaaaatgaagcaaccccgcgctgcaggcgttcccactgcatttttgctgcgcgctctgcattgctccggttggcgtaggtacgattaagaaccaacacgttttcatccgttcccaccagataatcaccctgttttgcttccggctctttgggtgtggtggctttctttcgacgacgcttaacactggttgtctcttttttcctgggttcacgcgtatgcaaccagctggcaataacaccggtataggcaccacgatcagcaagggtgaaccgatgaccgtcaccggctttgcgcgtgatggtgataaccggcagtggcttgccgcttgccgttcttccctgtccctgccggataaacagcaggttcccgtctttaacggaagcaatcgccccatactgtctcgccagtttcatcagaaaacttgcatcgctttcattggtctggtccatatgatccagcgccttatccgtcaggtcttgacccagcgccagatgaataacagcaccacggcgcggcagaacgatctgcccgtcggcgtcgtccagctccagatcaagctggtctgcttcaaagccccggttatccgtcagtgtcagactcatcaggcgcgcgtccatcaccgtcgtcacgtctttgccttcgatggtgatactgaaagccgggcttttgctgttcagattcaggagatcagaattaaagttcactgcagcaaccctccaaccgtgtttttaatccccccaatagcagatgctgcagagtcctgcaggttgctgagctggtcactcaggctcccgaacatgtcagagagcgactcatcaacccgtttgagggtgatcgtaaactcaatgcgcctgggcattccgctggcaaaaaactccgtctttgtctggctcagactctcaataacaaacatgccgtaaatggttccactgccttcaatcaaaggccatgccttgcccagttcagccatttgttcaagcgccagtaatgacagcctgcctccggtcacttccggcagcagaaccccggacagtgtcagtgaatcattatccgggccaagaaactgcgttgacgggcggcggttcacccggctgttggcggtgtgtcgccagctgcgctgatactgcagttcctgataagggacagtgcgcagcataaatacatataaacccagcaccatcatcatgattcataccccccctgatcgctgaaattgctgcgcgcttttgccctggccctgcgttcccgctcgtcaagctggcgtgccacttcacgggcaatatcctgcgcactctgtcccggctgcgcgacgatatgaatgggcgcatttatctcataacgaataactgacggcgggctgtcagccttaactggctgcgtctggtatgtcctcgcaggcaaactgaacggatgaagcggagccacttctgcaggtgtcgcagctacccccatcacgccagcaacgacagaggccagcgcagcagtacgccgcctgctggtaacatttgccggtccgttcacaatttcagggccattttctccgacaatgccaaactgcccgcgtggaatgatcccgcccgtgtcgtacatccccgcgtaagccgggaacccgcctggcggcagcaccactttgccgtcactgttcactgtggcggactgctgctgcgtaacctgcgcaggtagtttcgcctttgccgcctccttactgacaataccgagcttttccagcagccatgacacaccggatttaagtgactcaagtgggtgcatcaccatattcagaccttccgccagtgcctcaccaaaccgacgccccattgcagctgcgctgttcagttcttcggcagtggatttaaccggggtaagtaaatcattgaaccagccccacaaggcctgcaccctgtcaccaatccactgaaacacgggtctgagcggctcaaaggcggcgctgatgggcgcagcagcggctttgaacccttccaccacgccccccagaaacgcactgatgggctgccagtatttccagataaccagcgccacgcctgccagtgcagccacaaccagccctacaggactgagcagcgcacccagcaggctaccaacagcaaataatgccacgcgcagcaaagccagcggaccagagatcaacagacgcagcacgctacctgtacgtgtggcagcggcggctgcagaaggtaacgctttaactgacagcatggacaggccaaaccggataaccgccagcggtcccagcacagcagccaccgccactgccagcgcccccaacccaacagtaatggctgccgtagctgccgccactttcatcagcgtgccagccagcacgggattctgctcaacccagcgacgcaacgccccggtcacgcgcttaaccatgcccataatatccatcagcggctggcgcagcgtttcccccaggctgctgaaagcgttttgcgcgcccgtcttaaccagcaaccactgcgcagacaatgaatccttgttaatgtcggattctttctgcatggagccattagcaccactgcctgatgtgagtttcagctggcgctgcagctccggcaggttgttagccagctttgccgcatcatcgccaaactctttgccaaaaatcattgtcatggctgacaggcgtttatcctgcggcagattgttgaccttctccagaacccgctgaattgtgcccatggcatcggtggtcatctgcttttcaatctccgccggattgagttgcaacagattcatgccttcaaaaaatcgtttactttgcatggtggcaatggacagttcacgcaccatggcattagaggcgctggcggcgatttccggggctgccccaagagaaaggaatgttgaacccagcgccgcggcctttcggaagtcaaggcggtcagccacgccccccatacgctgcaggacgttgataatgtccccaccctttgacatggcgttatcgtccaggtagttcagcgcatcgcccagttgttcaatattgcgcgtcggaactttatagagctgcgcgattttccccagcccttctgccagttcatctgcgggcagctcaaaggccgttgccgcttttgccgccgtggatgcaaaagccagcaggtcacgtttctgctcttcgtaaggatcgtcctgattggtcacccccatgcgagcaccaccttcaaccagcgcggcatagtctatagcgccgttctccatcggcagctgttcgctggcggccttgatggcatcctgcatgtcataaaactgttttgtgcggttgccattatcgtcccgcagcccgtttacctgctttgccacgcctttcatggcatcttccatgctggcgtagctcttaactgccgccacaacaggtgcgcccattgccacccccgcagccgtagtggtagcccctgccccggcgatgcgatcccgcacctcaagacggcgtgaatactgatcgcggacggcgttcattcgcgcctgctgttcgcccaggcgtttaagggatttctgctgccggtccagggcctgccgggtttcgtcggcattctgccgcagttcccgctgcgcactactgagctttttcgtgtccagcccggcttcattgagcgcaagacgctggcgctgcaccgactgacgtagaccgttatatttgctctgtaactccgtaacgcggttttttgcctgctcaagcaaccgtgcctgcgccgccgtcgggcggttggtggcagagaattgcgtggcaagtttcgcagcttcttcgcgtgcggctttcaggctgttaccggtgactgccagctgcgcgctggccttgcggaaaccgtcaatgcggcccgcctgagcatctaattcttttagacgggcgcggctttgctgaatggctgcagccagctcttttgagctggcctgcgcggatcgaaatgggcgggtgagcttgtcaaccgcattaagaatcacctgcagacgcaggttattgtcactcatcgctggccccgcttcgctgaattgccttatgccgccacgccaacacctcagtcagcggcataacgtcagtgatggatggcgaccagtgaaagatggtggcgatatccgccacaagatcatcaatcgtcaggctgtcggtaaaccggcaagcaccgacttcttcaacaaaaaagtcaccacctctaccgacagcgcggtgagatcggcggggtccagctctgccatttcctgcgcggtcagcgtcggggtggagattcgtgggatcacagtcatcattgcgcccacgtccatatccataatggcctgcagacgggtgccacgcagtgcaccggactgaggcttgcgcagcacaatttcggtaatttcagctttaccgcgcatgatgggagtatccagttctacggtcttttcagtcagcttgtcgctcatgttcgtatcctgttaatgaaatactggcgcggctgcccgcgccgttaaggttaatcagaggccgagggcattacggtgtgcttccatcaggtccacgccgccaacgatttctaccatgttgaccagatcgacctcatagagcacttcaccattaatggtcagcttcgcgtagctgttggtactgctgactttggtgctgctgctctcgccggttttccactcgccggaatcaacttctttatggcgcccgcgcacaaccagctcaacggcctgcacttcgccggtatcgtcacgctgaatggaaccggtgaaacgcagctggatgccgtcaacggttgccttgcccatctgcttgaataacagcagctcggtaccgccgattgaaaattccgtgtccagtgcaccgtcatccagccccatgtccacatccactgcgcccggcataccgccgccgcgatacttctcaaacttgcgggtaaatttcggcagggtcagagactcaacgatcccctgccagttgttcccgtcgttgaacaggttcaggtgttttaacttgcgtggtaaagccatgattcccccttatgcagcgacacggctggcaaaatcgaccagataacgatcggtgatgcgctggcgcagcatcaggttttcaagcggaggcaccggcgtgtagtcataatcgatggtcagtttcccggctttaagggcgtctttatcgttaacagactcatccagccagcagtcaccaccaatcaggtatccctggttgaccagactgcgcatcttggcgcgtagtccttcaataatgtcgcgggccagcgacggattaagcacgccatccaccgcccacatgtgcgcctccgccatagtgtcagccagcacctgcgccgtgcgggtgtagttctcaaaagcaaacagcggatcgtcactgagacaacgggaaccccagaagcggaagccgtctttgcggatcaatgtggtgacgtcatttttgttcagcagtcccgcatcggttgccgggtcctgcaaatcccagaacacatcagcggaaatgccggtgacaccgtttacacccacattggacagggttttatgccagccgatctgctcgtcgattttggcacgcaggccgagcgcacgggcggaggcgtaagccgtcgcgtctgctttcagcacggtgtcaaagttgatgaagtcaggccagatcagcattccctcgcgctgactgaaattctcgcgataggcaatagcttcctccaccgttttgcagccattagcagcaaggtaggcaaacccgcgcaagctttgcgccacgcccagcagttcagtagcaacggcctgagtgtcatgtcccggcaccccaagaatgcgcggcttgacacctagctgcgactgcgccgacagtagcgctttcatgcccgttttcttaccgtcggaagttacgccgccgataatattggaggtggtttccgcttcggtttcgccctgcgccacacgcacaacgacagtcacgggttttgcctgatctgcaatcgcgtccagcgagcgggccagcgtgccggactcccccgctttaccgctggcggtgagcacatcagtcagcaggaccggcttattgagggggaacacggacgcatcagcatcatcgccggtgcagaccatgcccacgatggcagtgctcaacgtggtaataggtcgggtgccctcgttgatttcaacaacgcgcaccccgtggtggtaatcctgagccataaggcagtctctccggttgacaggggtaccttatgttctggttgccaggcgtgcggcgcacgtatttcacgatgtgtcagtgctggtacaatatcgccactttcaacgcgactgatttacagggaatttcttgtaaagagtggaatgctaacatcaaaaagcaatccaacacgatgacgagtttcaccggcggcaagcaaccgtccggcctgctcccattgttccggggtgagctttggacgcctgccaccaatacgaccttttgaacgcaccacttccaacccggcgctggtacgctcaacgatcagctcacactccatttcaatgccagaacggcaaggctcctcctgagcgaaaaggactttttttgaaagtttctggaaaataaaaatagtactatttgtagcattaattgaatcagccgaatttttctaattcatcaatcagatggacatagcatttgctataaaaaataaaagcattcctgctatctatatataaatgaattatgtacatataaaaggatcattaccgtgacaaaaataactttatctccccagaattttagaatccaaaaacaggaaaccacactactaaaagaaaaatcaaccgagaaaaattctttagcaaaaagtattctcgcagtaaaaaatcacttcatcgaattaaggtcaaaattatcggaacgttttatttcgcataagaacactgagtcttctgcaacacactttcaccgaggaagcgcatctgagggccgggcagtgttgacaaataaagtcgttaaagattttatgcttcaaacgctcaatgatatagatattagaggtagtgcgagtaaagaccccgcatacgccagccagacccgtgaagctatactatcggcagtttacagcaagaataaagatcagtgttgtaatttgctcatcagcaaagggatcaacatagcgccttttcttcaggaaattggcgaagcagcgaaaaatgcaggtctgcccggaacaaccaaaaatgacgtttttacgccaagcggcgcaggggccaatccttttataactccgttgatttcatcagcaaacagtaagtatccacgtatgtttatcaatcaacatcagcaggcatcctttaaaatctatgcggagaagatcattatgacagaagttgcaccactgtttaatgagtgtgctatgccgactccacagcaattccaactgatactagaaaacattgctaataaatatatacaaaacactccctgaacactgaaaaaccaaaaaatatgcggagcctcttcctgattaatatgaaccaatagtatccataatttcccccaggaactaactccggagctaaaccgtcatttaccagtgctaaaattatacactcaaccatcaaaaaaatagccattgctgctatataacatatagcagcagtctctactacatatctatatttttatatctgagctggtttctccggccagtctgggttagctgtatccacccggtttaccattacgctataaagttcccatgcttccagccgtttaatctcttcatctgtggcaattttcagttttaccgcccgcgccagtggcgcaataactgactctgcctcagcaagaagttccgcttttctggcttcagcctgtgcaaccagctcttcaggcgtatattcgcgatgctcaaccagtaccgggcctcctttcctgtgctcgatatattttccgtccacctggccctgcatcagctcgcgataatactcatctgtcaggggaattaaatcgtcagggtaattatcggattcggtatccggttgccagaaaaaacctttttctttaaagctgtaataataatcgctcattgatatttatctcccaattgcaaaccaggctacaggaaaattattgaccatattggctattgctgatgacttggtggcggcaaaaaactgactgttgctcaccgggtatccgaatgcgttatccacctgggtgccctgagcgttggtattggttacaaaaacggcaaagcaaccaacagggaaagcgcgcgggaaattgtaggttccgtttgagttaccaagtgttccccactgcattataaatccggtgctgtcgtccagaatccagccccagtcctgaatgctgccggtatttttacgggcgaaagtctggttaacataatcaatggtggcgcgggtgttgatgttgttgtcacgaattgccagttcactattgatccagtcaatcgttccacgggtatttagctgattagtaatccagatactcagccagttatccccccacactgaactaaaaatgtcaccattagtggtcatgcgcgcattatcgaaatgaatatcagtgagcatgtgtaatccgttaccattgatataacccactttggcaccgttacagtaaatatccagtacgccatccgcgctgccgataaatccactgtcactgtcaccgatatttatacacggtgtgctgccgtcaaaaacgccggttccgatattgccgatactcacgcgttttgtcgggttcagggtttcttttaaaccgatattttgtacaaaccgcggcttgtcaggaatgtctgcaccgttctgtgatttttgtagcgcatcggcggcacgatttatcgtttctcctaaacagaggtatgcgagaaggccggcgacatcttttccgcttaaattcgtcagcgtattgtccagcggctgctttccaccaagagcgtttaacatcgttgtggcaaaattcgggtcattccccagagccgctgccagctcgttcagcgtatccagtgctgcaggcgcagaatccaccattgccgcaatagacgatgccacaaattccgtgttcgcaatctgtttagtgctgttacccgccgctggcgtcggtacctttggaatccctgtgagtgtcgggctgtccttctgcgcatactgtgaatgcgggtccggcgcagcaagatgctttgccatcaggtcgtctacatataccttcagctccagcgccttatcatctacatatttacgggttgccagcactactgcagggtcaattttcagggtgatgttatcggtgctgctggtaatcagtaccatgcgcacggtctgcgtacgtccgctcccttctgtcagctgcggcttgtagctctcagggcagttacccacagcgatcagcgcaccggtttcatcaaacaggccaacttcacgaatccaccacccgccctcagtttccgggattacctgctcagcaataatctggctgttgttctgcgggtcgatatacaacatattcagcgctgcgcggcgcctctcagcaactaacgcggtctgttgtgcgctgggtgtgggcagcacaccgccaccgtctcccaccgccatatgggtaattttcagcgggataccgagcgcggtggcgcttgccagtttcgccgcgccgatgtccgtcagcagggtataaaattttgcgctcatgggttcactctcattgtgtcaataacatggactgccccgccttcatatgcggtgccgccggaaacaatcgtttcattgatatacggatataccgtgatttcttcgccaaggtagctggctgcgccaacccagtaagggccgctggtctgcatattaatggacatacctgtcatgtgacggctgcatggtttggcatcgcttatcaggcgctcaagctccagataggtgtcttcggtgataccatgatcctgtacgccaatatccagacggaacgtccccggcgtttcaccggtctgccaccactcaatgatgcggatcaggaagccgaacggctcaaccacacgccgcacggcgctgattgttcctttatgctgatggatatagaaagcatcctgcaccacacggcgtttgacgttttctgtccagctttcatcccagcggtcaacagaaagcgcccaggccagataaggcaggaatctgatcgggcaggttgccgggttccacaaatcacgcagcgatacctgcagatcggaaatcccgctgcaggtctgcgccagtcggcgctcaagcggcgacgaacccggcggcaacagactattcatccgtgcccccgttggtaacgctccattcagtacaggatgccgcctgcgtcttatccagcaccacatcctccagaggggacgtcagctccacacgctggacgccctccacgtgcaacgcggcataaatggcgctgcggcggatatcacgtcccagtctcgtctgactggcgatgtacttctgcaggctggcttttgccgccgccataacaggctccgcttccggccccggataaagaaaaatggtagcctccacccggtacggtatgatctccgcactacgaaccgtcagacggtcagccaccgggcgtacactctcactgttcagggctttttcaaccacatccagcagatcttttactgctgtaccgtcaccctcccggctcagtacggtaagtaccacctctgcaggagccggactggttgcgctggcatctgccacacgtccgtccgcacttctggcgtgaaattcataggctcccgtagggccagcaacggacagtccctcaaatgctgcagggatgcgctggcgcagcgcctcatcatcttccatcactgcggcgaccggcggtactgcatcattatcagcaggcactaccgtcagacgtttcacgttgcagttggctgccagctgctcaagatcatttcccatcgaataggccaccatcaccgcctgcgcagcctcgttaatacgctggcgcagcaggatttcgcggtatgtgctttcctgcagcagcttggtgacgggttcagattccagcgccagcgtgcgccgcaccgcgtcctgttcatccacaggataaagagccacaaaagcggccttgcgctcagccagcagcgtctcaaaatccggcacgtccactatctgcggcggcggtaaccgggaaaggtcaatgactgccattgtctgctcctgttgatatggaaagggaaaccggtgctccgttattactatgtcccataagctcaaccaccatagagccgtcaaaattgccgttgatggtgatggagtccagcgtaaggcgcggctcccagcggttcagcgccacatagactgcagacataatctgcaggcgcagtgccgggttctgcggctggtcaatcagggctgacagtagggagccatattcccggcgagcaagacgactgccctgcggcgtcagcagaatatcccgcaccgactggcgcagatggtcggtatctgcaatgacctgcccgtcattcctgctcataccgatatacaacgtcataccggacctcccgatgtatccccgcctgacttaacgccagtgtgaccgtgtttatccatcacgaccccgttagaactcattgcgccgccaccctgggtgacgccaccgttgatcaccacctcgctgttaatgcgtgttgtgtcagcctccaccacaaactcaccggtttttagggtgatattgtccgccgcctcgatcaccatggatttgataccccggacatgccaccgcccggtggcgggttcgtactcaaaccagcccccgtccgggtactccgtcacgcagccgtccacagaatccgacggcggcgcaaactgattggagtagatggcgggcagcacaaaagcggtttccagattgccgcccatgctcagcaccaccacctgctcatccggcgacgggcaccaccatgtacgggcaccaccggcacgcagcgtcagccagttaatccagttagtttcaagcgagcccactttcacccggcacagccagttttcccggtccacttcggtcacggtgccggtgcggatcaggttggtgataaggcgcatgatttcggtcagttgtgcattcataacgaaaggttgccatcagagggaaaagggaggcagcgcgggcgcttgtgccagcagtggcacaaagatcaccccgccagccagcgcagcagagtgtcacgggtgatggtttccacctcatcattcacgcccaaaaggcggcgctctgcgtagcggacctccgggccttttcggctgacgcgatcacgcaggccgtagtggtgaacacgggcaatgcgctgcaccttgccctcaaactgcacgctggcagagtcggcactggcagcagttttcaggtatttcgccgtgcgcagcttcgcaaacatctggcgtttgatacgccccttcttgctgcgggctgttacccggcgtggctcataactgctgccatcaggattgcgctgcatcctgatattctgctgctgtgcccgtcgcagttcctgcgccagttgccgcatcatacggttgcgtgcggcaggctccagattcgccagcagcgccgtcagccagtcatcaaccttctgcagctcatccacgtttcaccgtccacatttcttcgggttcgtccggctccggcaccgcttcaacgctcgatacgctgccgtcagtgctgaccagcacacgctcagtcagttgcaggttcatgctgatatcgcacacatcgtttcgcagaatatccacttcaaaggtgaacagtttttcgcgcagctccgggttattgatagcatccggctggttgtcacttagccacagcagcacaggagccatcagcagattctggtcgccgctgaaatcctcgatcaccacgttcagggtgtagcggtattcccatgacatggagctggcaccggttgccaccattgagccgttatcaacgaaaaggtgcagcttgtccgggttatcgcggacataagcaaccgctttattcagggcgctgcgtaaggactgcggtttgttcactgtctcgctcctgacacgcaataatcgtgtccactttgtcagcacagaccgcccaggcggcctcggtttcatccagcaccgcgttcagatcgccgttactgcgcggcgctgacctttccagacggcactgcgtcactctgggacagccactcacggtaagctgcacctccggcgagggccggacgctcccgcagccggataatgtcagcaggcaaaggagtatcagcccagcggcgcaaatcctcattttcacgtttcagttcctcgatccggtgctggcggctgcgcagaagtgcggtggtctgttccgctgccgcataaagccgcgcctgctcccggctgttggtttcggtcagaatggacaggccgatcagctggctgtttttcttcgtcagctcctgcgttttgcttttcagcaccgcgccctgcgtctcgatggtgtggctggcattgttaagccgccacgactgccagcccagcgccgcaagtaccagcgccagaaccactgccagtaaacgattcattcccgcagtgcctttagctcatcttttattgctaagctcatggctactgtaaaaacacacaccatccccgtgagcttccatccggcaagcaacatgacaaaggcaagagcgagacgctgataccaggtgagaggtactttatccattagccccagcaccctgctgagcaactgacggacgcgtagccgatcaccccccgtcaggctgcaggagtacaaaccagcacaacaaaccagtgaaaaagcggcatactcaaaccacataaccagcgccagtgggaaaagcgcatgagatgccgggaaattcacatcaaccatcacaaggagcgccagaaccgagaacggcagccagtaactttttaaccatttcatttcgctatactccttttaagcaccaggccatttcccgcgcgcggcggttgtccagcccctgattaaacacacctttgacatatacccagcgcggcagctgatggcaggcatccgcccagcgccgctggttcagcaacttaaccagcgtggagctgcaggcgttgccggtgcccacgttgaaagcaaacgacaccaccgcgtcatagaccttttgcggcatcggctgtaccacacatttatccagtgcccgctccacgcgcagcacgttggtgataagtccctgcgccgcctgccgttccgtgatggtttttccaggcaccacaccggacgtattgccgatcccgtcagtccagacgcccgcgctgcactgataaggctgcaggcggcatccctcgtaatcggcgatcagtttcagcccctcaacggaggtatgaagcgactgaaatccgggcagcgtggcggcgatagccagcaccgccccgacaaggcagcgcttaacgattgaaggattcatattccccccgcgaaatcttgccgccacgtaacaatttgaaagactggtgtttgtagtaccagttgatagccagcatcagcacaccaatcagtacgccgccaaccgttgacgcatccttgagcgacagatcgcccagccatgccagcagcacggcgatgcagtaagtgataaaggcgctgattcgttcaagcgtcataattcagtcccatagctggacggtctgcgccgtggttgacgccgtaatgtccggcagctccacctgcagcccgtgcggtaaaaatgggccgtactcagccagccccagatttgcctgcagaacctgctcagtgacaccctgcgtgcgcccgtaatgacgccagcaaagcgcgtccaccgtgtcatactgatgcgcacgcactttcatcagataagctccaccgtacagtgcggtacatcctgcacccggctgatggcccagcgggcatcacgccacagatcgccgctggcctccgccagctcctcccctcgcttcacgcctgacgccgtggcgtcatagtcctgataacgctcattaagcacagcgcgcgcccagcaaaaaacagcgttgtggtagtgccggatacgctcgcttttaccgtccagcatttctgcgggaacctcagcaagtgtccgccagcccagcatctgctgacggttgcggaagtcgtacagctcagcgttaacctcagagatcgccgtcagcacgacctgctttaaacgcggctgcgtcaccgtgccgtcagtgcgcatcacactgcgaaattccgacaggtccacatcaggccagaacggcgtatttttgatgacctccgcctgttccggtgcctgttcgggcgcaacaaacttcatgcggctttctcctgaataagtgggcggtggacggaattttgatgtggcagtgcctttcgccatcccgtgccgcccgtgcgcggggcacgttcgttagcggctgtcattgcgcagtctgcgctccagctgctgcttttcttttttcacaccgcagcggggatcgagctgcagcgcatgggtaaggtgattcagggcagacgccggattgctttcgctcagtacagcgccgatggctttatgcaggcgcgcccgcgactggtccggcatatccagatcagttgtcaggtccagcgtctgcagaagcagatcggcatcaaaaccggcagcggccagcagagcgctttgcgccgcgtctgccatttcttctgccagcacggtctgcacgttacggttgcccagcggcatcacccagccatggcgcagcgcatgacgcccgatttccagcgcaccggcataatcaccggcatcgatacgccacagcatcacgtacatcagcacgtcatcctgctgcgcacctccggcagccagcacgccctccgcccaggcggaatatttcggcagcagctccaccttgatttccgcctttttcaccgtggactggatgcctttaaggcgacggcgatcttctgccagttgcagcagcatcaggtcatagccagacgcatggcggcgaacactgccgccctcacgggcggcctgttcggcctgaatgcgcaggcggtgctgccgtgcgggactcaggctcatgcgttactctccatttcctgactctgcggctacaacaggtgcggcaggcggagtgaaatcactcatttcgatgttttccaccagtgccgcgcagcggtagtcctcgaccacatacgcctcgttaacggattcaaagttttcaatccggtcacgtttcgggttgtcgataacagaacggcggcgggtgtcttcctgccagtagatggacaggttatccagtcgggtgattaacaatgcatttgccggaaagaaaggcgcacgcacagcctgcaggccgcccatacgtttctggctgatgatcatatcggcggcaattttttcgctgttgtcctgctctttgttgaccagcgggaaatacttgtcagacagcagttcacgaccacagacaacaaccagctcatcatcatcctgatactccacatcgatcagctcgttgacggcatccatcaccacagcgtcaaggtttacatacttaccacccggacctacttttaccggctccgcagtagtggtgccgtcttctgcggttttactgcccataacatgatccggcgcgtcttcgcggattttctgtaaccagcctttattgacgtcctgcagcagctggttttcagcacgatttgaggttttggcgcgcttcacgccgttaaagccgatcatgatgcggtccagcgcctgacgcttgacgatggcgttgcggatacgcacctggaagtcctggaacttggcccacagatccagttttgcgtaggtcagcaccgtatcaaagttggtctgttcgcatttgtattccacgtcttccatcagcgtcggatcggtaggctcgcgctctttggtggtggtatcggtggttccggcaatggtgctgccaacgcccagccccagcaactgccctgactgctcagtgaccggcgtgatgttaatcagcgtcaggaaagcagcggactgctggatgtggtcttccagcgtctgctgcacggacggctcaacggtgaacttgctggagagttcttcaacctccacaccattcaggcgcgccagctgctgcaggtaagcgttaaaggcaaagcgggttttctttttcatcgggttttatgctccatcagcaattggtcagggtgcctgcaggtgcgtcaccgcccggcgcgcgctggcggtaatccttgcggctgtcttcgcggctcagctgctgctgtagctcggcaaaggcggtctgctgttcctgcagggaggactccagcgcggaaaggcgctcaccgttttcagccagggatttatcagtgcgctcgctcaggatctgctgctcagtagcgaccagctccacggctttatgcacatcagagaatcgcgcatcgtcggtctgctcttttttggtgaacagcgcggtgacgcgggcaaagagggatggcttttcgtcctggacctcttccagttcgatcagcgtttcaaccgcttccgaaaacaggttttcagggttctgcttacggtttgccagcgggttatgtgcggcgctggcgctgaaagccagcatttcggtgccaaggctcgcaggatcgtctgtcgcccccagccccacaaggtaggctttgccggtgtcggcaaacttagtgctgacctccatggaggtgaaaagcttctggccttttttcaccagttccaccagggcgtcagtgggttcgatatcggcataaagtgccatcttgcccgccagcgggccgtcctggatttcttctgcaaccagccccgtcaccctgccatagcggttaaacgtgctctccggcagataagacttgatgtgctcaaggttaatcagcgcggtatagaccgtcgggttgtagctggcagccatctgtaccagccattcacgctggatctcgcgcccgtcagtggtggcaccttccaccccgatacggaaacgctttgctttcactgtcatgagccgtgctccgttagaaataacttactggagccttatgtttgcggtgatggggggagtgagacaacgcgctgtatttgtacggtaaaccacacaaaacgcagccggggaaagccgccatacaaggccgtatgtttgggccatgaacacgacactgacccccgcagacctcgatccccgtcggcaggccatgctgctgtactttcagggataccgcgtagcccgcattgctgaaatgctgggcgaaaaagttgcaaccgttcacagctggaaaaaacgcgacaagtggggcgactatgggccgctggatcagatgcagctcaccaccgccgcacgttactgccagctcatcatgaaggagcagaaagaagggaaagacttcaaggaaattgacctgctggcgcgccagtcagagcgccacgcccggatcggcaaatttaacgacggcgggaacgaagctgatttaaacccgaaagtagccaaccgtaacaaaggtccgcgcaggcagccggaaaagaacgttttcaccgacgaacagatcgaaaagctggaagaagtcttccacgcctcaatgttcgactatcagcgtcactggtttgaagcaggaaaaacaaaccgcatccgtaatctgctcaagtcgcgccagattggcgccacgttttattttgcccgtgaagcattgattgacgccctgctgaccggacgcaaccagattttcctttctgccagtaaggcacaggcgcacgtctttaagcagtacatcatcgactttgccaaagaagttgaggtggagctgaaaggcgatcctatggtgctacccaatggcgcagcattgtactttctcggcaccaacgcccgtacggcgcagagctaccacggcaacctgtaccttgatgaatatttctggataccgaaattccaggaactgcgcaaggtggcctccggtatggccattcacaagaaatggcgacaaacctacttttccacgccgtccagcctgacccacagtgcctatccgttctggtccggcgcgctgtttaaccggggccgtgccaaagcggacaaggtggatattgacctgacccacagcaaccttgcgcgcggcctgctctgccctgacgggcagtaccgccagatcgtcaccgtggaggatgcggtgcgcggcggctgtaacctgttcgacctcgaccagctgcgcatggagtacagcccggacgaataccagaacctgctgatgtgtgagttcgtggacgatctcgcgtccgtgttcccgctcagcgagctgcaggcgtgcatggtggacagctgggaagtctggaccgattttcaggcgctggcgctgcgcccgtttggctggcgcgaagtgtggatcggttatgacccggcaaaaggtacgcagaacggtgacagcgcaggctgcgtggttatggcaccgccaactgtacctggcgggaagttccgaattctggagcgtcatcagtggcgcgggatggactttcgcgcccaggctgatgctatcaaaaaactgacgcagcagtacaacgtgacctatatcggcatcgactcgaccggcgtcgggcacggtgtttatgagaacgtaaaagcgttctttcctgccgtgcgggagtttgtctacaaccctaacgtcaaaaatgccctggtgctcaaggcgtacgacattatcagccaccgccgtctggagtttgatgccgggcacaccgacattgcgcagtcctttatggctatccgccgcgccaccaccgccagcggcaaccgtccaacctatgaagccagccgcagcgaagaggccagccacgcagatttggcctgggcaacgatgcacgcactgtttaacgaaccgctgcagggcgaatccgccaataccagcaacattgtggagattttttgatgagtgagctcgaagccttaaccagcacaacgccaacagaagatatggcgcctaaaaacgcagacgtaactgccgaggctttcagctttggtgatccaatcccggtgctggaccgccgcgagctgctggactatgtggaatgcgtgcagatggaccgctggtatgagccgccagtaagctttgacgggctggcgcgaacctaccgtgccgcagtgcatcacagctctcccattgcggtaaaacgcaacattctgaccagcacctttatcccgcatccacttcttagccagcaggcgttcagccggtttgtgcaggactatctggtattcggtaatgcctatctggagaagcgcaccaaccgactcggcggcattctgtcgctggagccatcactggcgaaatacacccgccgcgggatcgatttagacacctactggtttgtgcaatacggcctaaccacgcacccctacgagttcaccaaaggcagcatctttcacctgatggagccggatttaaaccaggagatttacggtctgccggaatatctgtcagctatcccttccgccctgctgaatgagtccgcaacactgttccgccggaagtactacattaacggtagccacgcaggcttcatcatgtacatgactgacgccgcgcagaaccaggaggacgtgaacaacatccgccaggccatgaaaagcgccaaaggtccgggtaacttccgcaacctgtttatgtactcacccaacggcaaaaaggacgggattcagatcatcccgctgtcagaggtcgcggcaaaggatgagtttctgaacatcaagaacgtgagccgcgatgacatgatggcagcgcaccgcgtaccgccgcaaatgatgggcattattcccaacaataccggcggctttggtgatgttgaaaaggccagccgcgtctttgtccgcaacgagctgatgccgctgcaaaagcggctacaggagctaaatgaatggttcggacaacagataattagttttgatagttatgagctataattattgaggcagattacctgcctcctttaaagtaaagaagtatttatattatttaaatatatttttgaatattcagcaatgcgattaattgagtctgcaataactgccattaagtcatcgtaatcttcactagtccttaaaggactggcaagattattattaaccagttgaatatttccttcgcaatttaatcctaagggattgtttattttatgaggtacaacagcaaaaataggtctacctgcttttatcgcaaaatctgcttgagtcatagtgccgctatccttcgctgcctcaataagaatggacgttgccgataatccaacttggattctatttcgttgaacaaaagattgtttaaatgctggtcgacctactggatattcagacatccatgccccaccattctctaaaatgtctctagccagtttggcattttgtttaggtttggctaattcgagtccatgagctaaaacagcgatagttttagcatgtgcatcaagagatgcctgatgagcatttgtatcagtcccgatagcaagaccactaactatcactaacccactcttacatattctagaagtgactctctttgtaatctcctctccagcacgcgatacctgccgagatccgacgatagctacgcctggcatttcatgaagaatattgacatcacctctaatataaagcatagcaggtgggtttggtgtcattgctaaagaaagtgggtaacgtttatcaccaaatgggataatttctattttatattgtcggtgaatatcataatacctttcagcatttattaaactttcaactgttaatttattttttaaaattgatgttagattgactgactcaaccaaatcatgaatatctcttaaagagtcaaagcgtaaactattaatgagttttaacaacccttgctctgaggttagcctctctgtttgaatagtaaggcctaaatatttcttcagatctgaagggcgcacgctattactcctcataattcgctgtttccaacaatgctaatggcaaaactgttctcgcgccttttgattttaacagatttacgcacgctatcatacttccgccagttgttgtcacatcatcaatcagcaaaatcactttattctttacatctgagactaccgagatcgttgccatatgattagccactgagcgatctccgttatctttatgtgcgctcggaacagtggtttttctctgtagcgactgaccaaccttaccattttcataatgtccacatatcttctgggctatagtttgtaacgcagaagacactttaccctcttcatgcgatgggacaacacatacttcaaacggtacagaagtgaagtcctttttattctctttctttccaataatataatgttctaattcatcaataattaaacttgaaaatgtttgaatagcttttttgtggttttgattattatgatccttcaaatccatcatcgcacgtgatagccgatcacctgcttttgggttacgctctcctctgtatcgatatggatgataagtaccgcagcaaaaaatttttacttccccagtcataatacatttcttctcttaaattatttaaccccatagtaaataagaatttatgctattgacaacataaacgacataacaaaatcaaaattatgatttccagcacaatttccagcatacggctagctgcgcgcgctcgtatccccgccacgcctgcccgctttatgtagcggttttcatgcacctgcatgacatgagcaaaagcccgccagttctagcgggcctcatcaaaaacgatcctcaaacgatcatgcagatccatgcagcaaagccatgcacttatccacgtatatacctaaaggactgaggaggtacagcaccaggtatcaattcattaagcgaaactggagtatcatagcgttgagggttttttactgctattgcgaatcccctgtctctttcggaaaaatattcatcaaagaaatctcgcgtaatacctgcatacttttttgtcatatcccataattcatcgggctgagatgataaaacctcatcaatttcaaactcaccaattacctttccaacaggcattgtcgcataaataacaaccacacgggcttctttattccgaaaaattgtctttctgaattcgaattttttatatccatttaaaatggattcagcaaactctggtttaatcgacaataaaattttcatttacctttcccgcacttaaaactgctttaaagtggacatcacttaacgtaaagaatcctgagtaacttggagtataacctaaaacattcaataattcatctctaattattctttttcgcaaaggaaaattgtaagtcaacttaattacatgtggaggataacctttcctataataagcttgtaattcttcatcagaaaaaatactagcgcctccacaataagacttaaattcattatatgagggaaattctcgaatgtttttatactcctgtaatgtacaaacagaagtagccaccgaccgatatttagctggaccaagcccatctgacgttcgataaataagtatattatctccaggctgaagaaactccatacctttcattgcaccaatatatatcttatgaatactattagtataggtaacatcttctaaaatagaatcattttcatttcttaaaatcgactcagggaaaagctttgaatgaaactctggtttaatggctaataaaaaatttctttcattcatttttatcataggataattatcataagctgatgctgatgacgacttccagttaaaattcttaaaatagactccttcacaaccgttttctgtctcaaggttttttcttgaacacaatttgaaaccatagcgttcaagtaagccgatcaatccctgatgcttatcaaagatagtaacatacacttcctgaatatcatgaggcattgcaaagtcaaatattttccttacaaatcgctcccccattttcgttccacgagcatctattttaaatgtcccacatttaagtcgttttttcatagggaaagatggggtcatatcatttaactcttcattttcaattttgagatataaaaaaccatctatttttccatagtcgtcataagatacgtatgctttctcatttcttttttttaggaaccagttttcaaaagctgggtagtcatttttaagcgagtcaaaaaaaacgtcagagaggtcaactttcccaaactcgacataactaagagacattgtgccatccttttcagtaggtattctgcaaagaacgttactgtagctcaacatatatgtaaataaacttagatcaaaaaatgctcactaaagcctcgccttgctcgttgttcaaccttgccagtgcaaggatttaaattcttacgctggcaacgttccttagtgcagccagctgtcgtcctcccagacctgctgcatgatttccatcactcgcttttcatcttcatccagttttaacccgctcaactcaacgccgttggcactgcccttgcggatacgaattgctgttttgggatacagagggcgcaaattacggtaaagctcggattcaagggcgtccagtgtagactggctaatcttctgctctttatcgatcattatttcaatgcgcatacagattccctttaactggttacgtccattgaccggcagtattcatggctgcggattttcgccatcaactcgtcggtcagttcggacacccactggatagccagccgcttttcttcgtcgctgcactcactagccgctacaagcttgataaaaaaatcaatgcgctggagcttcaacgactccaaaagatagtcctgcatcttccctcctttcactgccacggaacacaatactgtatatataaccactgtttataattacagtatattagaaagttagaaatgtaaaactctttttatctgtcaattagatagccctgacaccgatcaataacagcataagttattaacccgcgtcagccgtaccactgccgccatctatcatcttcctgcagccgctggtttcgttaaaaaatacgtaacccagccccggatggaatactgccgccacgcagaagcagatccacttccgcattgcttacatcaaagcctctggaactcagttctgccttgagctgcaggcgctactgctccgaaatattctgtttgtatactgttttccgcttcggttttaccagtctcaacctggcggtaagctcccgccgttccttctggcccatattgtggagataatactgcagttccttctcattcatggcgttaatatctggtaaatccccccctgatttgttcgtattttcaacagggggacagttattgccacgagtccaaggggcgctagcgccctggtcggctaccgcctcctgaacgtcaacggccttgcgaacctttttccacttcaccgcgtgcgtgcaaatcttgccctctacaatcggggaccagatgccatagatacggataccgtgatcaccgtaggcgctcggttcgtcgttaagctcataagccgtgcggacaaggtgatgtttgcggggaaccagtacaccgccctgtttcatgatgtaggtggcaaagcaacctgcgtccgcagctgccagtaccgcatccagacgcggattatccagtaccggcgcacccgctttgcgttcgccctgtactctcgccgcctgacctgccagcaagcgcagctcgcggtatgcctgacgccccggaataccaaagaaacgaaattgctggacacggtgcagcgacgcccaggcgctgacatgctcggcgctgtcacgcagtgatctgccggtttctttgctgatttctttagccagcccgcgtccgtcgatgttcttactgatgtatttggcgatgtagcttgtcggcgtgcccttgcgcgggttgattagctcggacttgaagcgcggaccggtattggtgcccagctcctcgcggtcttcacggatggcaaacttacgcagcagcgcggtgatggaacggcgatcttttttgcgcataaagcacagaagatgccagtgcacggtgccgtcatggtgcggctctgcaacgcggacgccataccagcgcagcccggccttgtgcattgccttgcggaaagcagcgaacgtatcaaccagatagtcactgctctgccggacagtggcactggtccacttcggattaggtctgccgttgttgagggttgcgtggaagcgtgacgggcaggtgatggtataaaacacagcgcagtctccgcgcatttccgctatcagctccagtcccttaacacaggccatcatttcattacggcggtgtgccgggttgctgttgctggcattcaccacatcttccatgtccagcgtgtcgccgtcttcgttgaccagctcatgcgaacggaagaactccagcgatttgcggcgctgctcgcgtttgtggatcacggcttcatagctgacatacggggacgcttttttgttaaccaggcagacggctcgcagctgttcctcccgccactcacagcgcatctgccaaagtttgcgataccaccagtccgcgcacagcatacgcgccagcgacggtgggatcagttcataaggcaccggcttgcggcggcgctttttgcggcgcaactgctcaaaggcaggcgggatgacctcaaggcgcatggcttctgaggcaaccctttcccatgcctggcggatttcttctggtttaacatcgtcacagacaaacaaatcaccgcaggccgcatcaagacacatgctcatatgtgccgcaaccagtgtggaaaggcgcttaacctgatcctgattcatttcaggcagtaccagcagtccctccagcccatcatggcttgccatgaaccggaaagatgcagacgcctggctgtcacgcacgcgctccagccgctcaagacagggcctgatggtttcacgcaggtagcgggaataagccttttctctgcccaggctatggaaatatttaatccgttccagcaaaggcttgctgatgtgtggtggcatggcgttaacgtcagccagaataaccagatcaggattaaaacgctgctgctcgcgcgccattttggcacgactaatcagccggtcctgcaccatttcgcgctggacaggatcacgggattcattgaagaaatagcgttcccagacctcatcgctcagcgcctcacggcgcagctgctcctgctcgttatccgcagcgtaaagagcgatcaggtttgaaagcgcagactccggcgcaacgtccgccgggtccagatatgggttaactgcttttttggggttattccatgaaaaggccacggcggcctcattcgagccgccggtggttggtgcattatgtaatgtgaatttactcactgccacgcccgcacctcagtttccaccgagatatctggaccagacgccaaatcgacaccaaaccagcctgctgattttgtggcgatgatttctgctgcagatttaccatcaccggcagccacacccatgctgcgctttgcaatgatacgatggcgggtaaagttacgataaatcgaacgggtcagggacgtgtcgctgttggacacgataaccggatgcccttctgatgacctgcgctcaagaatagacgccagatgatactggtcgtccactgtaaaaccggcagtgtgataaccgctaaatgtgccatcgtatggcggatcacaataaacaacatcaccagcctgcagcagcgccagtgtttcctcaaagctggcacaaataaacattgcacgtttagctttcacggcaaaagtgcgtatttcattttcagggaagtacggttttttataatgtccgtatggattgttatattcacccttctggttataacggcaaaggccacgatagccatggcgatttaaatacagaaaatatgccgccttttctacctcattagaaatggagtaattaaaatgctggcggacacggtaatactgaacatccgaattaaaacctttaaataactccctcgctatttgaatgatagcctcatggtctttctggatcatcaggtaaagattaatcaaatcaggattaatatccgcgacaagataatgatgatagtctgtcgccatcattacagcgcatgaacccgcgaaaggttcaaccagtcgcgggccagcaggaaggtgcttaatcagttccggcatgatggcggttttatttcccgcccatttcaggatggtgctcatacagcgcctccgttgtagtgtttacctttaagctctgcgatttcctgacaggtaacgcagagatcacagcccggcatggcggcccggcgttcttcgggaatgactattccgcagctttcacactccagtgaggaagccccaacttttcggatacgggcattgtggatgtggcgctgcagctgttcttccacccgctgctgtacgagatccatagagtcagccattagtgcagctcctgggattcgttttcgtagcgggtagcttcacggcgcagcagttcagccgcttcaataccgtttaaccctttgttggcgatatgggttgccagcgcctcaagacggattgaaactgcaagcgcgcgtcctttgcgctcctcacgtttggcaatatcgatcaccgccataagctggtcggtttctggtgcaaacatttttggtaattcgttctgcattgttttttctcctgaatttgggcaaaagaatgcccggcgggtttacgccattaatttctgttgtgggttaattcggcatggttagccgtttgggaaataagctcaccactgcacgaaaatgattcattgctttcaccagttcccgcttttcgtcagtagtcagatcactaatattgacgccgtgacgttctgccggaatttttgccataaagaatatggctgccagtgcccgctcattttgtttatggtttatatcgcggcggtcgcgcatatctttaataaacctttcaagctctggctcaatattcagaccaaacacattcgcccttaattccgctattcggttcagcccttccatacgttgacccgggcttaatggaacagtcgccgcagcgccttcaatagccatggtttcccccgtttggtagtggtcagccctgccagcagttcatcctgagagcgggacgggtgccagcgcttgccatctttcccgataatccagccatggccgcagtgcatagctggactttgttttttcaataatgatgcaaaacttggttcttccataacccctccaatatgtgccgggatgtttaaccacgcccggcccgtggtattctggtatttccacacagccagaaaggaaaagacatgaaaaataacgaacaacagaacgaagctcttaaacagttaactaacgtccttactgaggcaggtaatcaaaccagagtcgatgtcctcgcccactcaatcctgctgcaagctattttttctgttctttccgaagaacaaaaaaatcaaattattaaaatccttcagaccgctaccgttaatcaacatgctgcgaccgcaggcgttgaagcagaagtaaaaatgtctctcgctcagcttttaagcggttttttaacgcctcagaagctgaattaaggacctgatcacacttttcacatgcacataggcagcaggagttattagcgtgtttgctgcctttatttttctcttccatgttcacctcagataatgccgaacgaagcgccaaggcccgttacggtgtccaccgcacttgccattgcggggttggcctgcaggcgggcctgcatggaaacggcagccagtgccatcagacgagttactgaattgatactgctgatcacgtcacggcgcccggcggttgttttcacatcgccagtaacggcaccggcggcaactcgcccgatttcagcggtggcgctcatgacgtagtgcggcaacttctcttttgccacttcgttcatcggcacacatggcaggcagtgaatctgtgccaggaagccatcaaccagggttgagtcctcagtgagatcggtaagcagccagatttcaggcggtgtgagctgatgcggctggtccgggttcagcttgttgcgcagcgtctggacattcattcccgcgcgttctgccagcttcgccatgttgtgacgcagtgcgaaagcccggcaggcctcttcaaagtgtggatgtttggaaatcttataatcaaacatgtttcatacctcgaaagttcacataattgaacttaacaaccaactacaacgttgtaattgaatgcagacttgtccatgtttttgctcgcctgatcctttttgtacttgaggtataaaatgaacacacgacctttatttttttctttcttttcaatgtagttagcaagtttaccgttgtgaatcatttggtaaacggagccgcgggaatagccctcccactcagcaaattctgccggggtggcaatcactttgggtactcgaattgaaatctcagtgctcatagtgcagtatctctcggttaagatttggttcacgtcgtcttatcttgttttatacgattcaataatggaactatcgagatactacgatccaatatttgatacgtcaatagggttaataaatgatacaggtaaaggctggagagaatactgggggtagagaggctatccataggctgatggctgcctataactttaagtccagacagcaactgtgcgatcacttaggcgcttcaaaaagcactatggcaaacagatacttaagagatagttttccggcagaatgggtgatccagtgtgctttggaaaccggagtttccctactgtggctgacaaccggccagggtgatccgggttcaaatattgatccaaaaaaagatatcaatttagtgaactcaagcaaagttaagccactttctgaacttgtttcgccggaaatcgacaaagctatccttagtggtggttcactcgctgaaggtggtaaagcagtgattgatagcagtctgattccctccggagcagatgacctactgcttgttaacacagatagcgattcttacctggtagaccgtagccaaaccctgccagtaaacggcatgtggttagtagatatcgatggaataaaaagcattgtgaaattaacacgcctacctggtaacagattagttgtgcatcaagatgaatcatcgtttgagtgcagccttagtgatattgcggttgtagggcgcgctctaaaaataattaagagcctttgatatgacgatcagaaagcagccgaacggaaaatggttgtgcgagtgctacccaagcgggcgtgatggcaaacgcgtacgcaaacagtttgcgacgaaaggcgaggccatagcatttgaaaacttcaccatggatgaggtgaacaaaaaaccatggctgggcgagaaggacgatcgccggcaattgtcagaagtgattaagcaatggcattcactttatgggcagacgctggcagatcccaaacggctaatgtcaaagctcagcattatttgccatggcttgggtgatcccattgcctcagagttaaccgcgggtgactttacgaaatatcgcgaggcacgtttaaaaggtgaggtccgcagcgaggatggcgcgcttatgtcgccagtcaaaccccgaacggtgaatcttgaacaacgcaacctgtcctctgtgttcgggactttaaaaaaactgggccactggtcggcgcccaatccgctcgccgggctgcctacgtttaaaattgccgagggtgagctggcgttcctggcacctgatgaaatcaaacgccttcttgatgcatgcgctgattcgcaaagtcccagcctgctgatgatcacaaaaatatgcctttcgaccggcgcgcgctggagtgaggcggaaaacttgcaggggcatcaggtatccaaataccggatcacctacaccaagaccaaaggcaaaaaaaaccgcaccgtcccgatatcacaggacctgtatgacgaaatcccaagaaaccggggaaagttattcactccatgtagaaaagcctttgaacgggccataaaacgggcaggcatcgaacttcccgaaggccagtgcacccacgtcctgcgccataccttcgccagccactttatgatgaacggcggaaacatccttgtattgcgcgatattctgggccatgccgatattaaaatgacgatgatttatgctcattttgcacctgaccatttagaagatgcagttacaaaaaatcctctcaataatctaggatgggttagatgaaatctgattacagcaatgacgactccattaccaactttttcgattcatttaaaggtcgaaaacttttcaagttgcctgtagagattgaagaaaaccaaagcttagtaagcgatttcattgaaaaatgcaaagcaatcaaaatacacattgaagaacatatcaataattcaaattatgaaaactcttctcaattagaaaattgcttagacgtatttgactcacttgaaagggggatatcacaaactctagaagcatttctatcaggagatatcaaagcctcatacgataaattcgaaaaaatgttggaatcgaaacatacatctattcacttaacaaacataagtactcggttgagtgcaatttgcaattcagagacccctttatacagagtaagaaaatctgataattacttaacaaaaagagaagagatttttcacatccccttcagccaacgtcatttagttcgaaatcaaagatattcagtagcaggactcccatgcttatatttaggcgcatccttatacgtttgctggagagagatgaataggcctgactttaacaaactttttgtttctgctttctatacgtcgcaaactcatccggaagagatgattttgaatctaaatatcgaggcgctgattgatatcacatcaaattttagaaataaaaatcaaccgaaaaatttcaaattagcattatcactcgtcgctttatggcctctaatattatcctgcaattatttgaacaaacaacaagatgccatttttattcaagaatacgttattcctaatttgttaatgcagtggataagtcgacaagctgaacataaaataatcggcattgcataccatacaacaaaaatcgatagtggatactatggttacaagggcttgaatgttgtattccctccccaaattaaccatagcgatgttaagcgccatgattattgcccacatcttgccaaacagtttgtatgcacccctcctttatcatggcaagttcttaaatccatagaatacattcctgaacgccaatcaatatcaagcacagaaaaacttagtaaatatctaagaagaggtaaaaaatgggatatcttagaccaattagatgaggagatagtgagcgtttatcaactgacagatttttacaagctagaagtttgcatccaagacgttcaaaatcctggaaggataaaaaccaaaaaatagtggcggcacattggcggcagagccttaaaacgccataaaacccgacagatacagaaatagataacataatgatttaaaaagtaaatgtatgtttttgttagggtaaaaatggtatgtaggaatttcggacgcgggttcaactcccgccagctccaccaaatcatgatccggatacgtccggtgaagtacagaaagcccgcacagcacaagccctgcgggcttttttgtgtctgtcgttgtccgagaacatccggctaaatccagtgtttattggtatacgttttggtatacggtaggatgtatacctaaaagcgtataccaattcatgaaggagcggccacagtggcacggacaactcgccccctaaccaacaccgaagttctgcgcgcaaaagcgttagagaaggatctaacgctgcatgatggtgatgggcttttcctgatagtgaaaactagcggcaagaaactctggcgctttcgctatcaacgcccagcaacaaaacagcggactatgatgggacttggtgcttttcctgccctttctcttgctgatgcccgagggttaagagcagattaccttgccctattagccaacggaatcgacccgcaaattcaagctgaagttgcagaggaacagcagcaaatcgctctggacagtattttttcgacggtcgccgctaactggttccagctcaaaagcaaaagcgttacccctgattacgctaaagatatatggcgttcactggaaaaagacgtattcccagctatcggggagacccctgtccagcaaatcaaagcccgaacactggttgaagcccttgaaccgatcaaagcacgtggggcgctggagacagttcgtagactggtacagcgtatcaacgaaataatgatttatgcggttaacactggcttgattgatgccaaccccgcgtcaggtattggtatggcttttgagaaacccaaaaagcaaaacatgccgacgttacgaccagaagaattgcctaagctgatgcgttcgctagtcatgtcaaatctaactgttccgactcgctgtcttattgagtggcaactcctgacgctcgttcgcccttcagaggcttcaggcgcacgatgggcagagatcgatctcgataaaaagctctggaccattccggctgaaaggatgaaggccaagcgtgagcacattgttcctttatcgccacaggcgttaggtatactggatgtgatgaagccaatcagcgctcaccgagaacatgtttttcccagcaggaatgatcccaagcagtccatgaatagccaaactgctaatgccgctttaaaacggattggttacggaggtaggcttgttgcacatgggctgcgctctatcgcaagcacagctttaaatgaatcaggctttaatgctgatgttatcgaagcagccctagcacatagtgataaaaatgaagtacgaagagcttataaccgctcaacgtacctgaataaaagaatagaacttatggcatggtggggaaggtttgtttatcaaacaaacctttaataactatactttaaagaacttatttgtcgaagataactcaaggatcgagttattcatcatcattttcaagtcagtatcttctgagaacttatcactcaatattgatacaatatattgaccatttatattatttgcttcaaagaatatatctctaatttgatttacatcgacatcttcaatactatcatgaataacaaaagttgctctctttaatttaaccttatcaacaaacttaatataagccaaatcaaatgcagttatttcacctttcttcttaccaccattgctgtttggcgtaacgcatgatatatcaaaattgcacctgcctttatcaatatcaaaggaaagatcaaaaatatatctttcaccataaatttcctttgtaagatcaccaaagaactcattgaaaacctcaatgttcttttccaaaccttgaacggccaactctatttctaaaagtaattgctctcgactatcttcaagagattttattaaggcatttgtatcattaatacgcgtaagattagactctatgctagcaagattttcgcgtaactcagttagcttattgaataattgatttatagactttaatgtttcaggctctttgattgttctaaataaagatgactcttgctcatgaaaaccattaattttttcatttatactttctatctcttcttttttctttaataattcagattctaagaaattaattttattcttaataacgtcattatggaacaataccatttcttcgtaagatcttttaagctccccattaaaataaacccctgccgaactatagatttccattaaatcattttctacaagttgcgtgatattgttcttcaaggacaagatcgactcttcaatatttcttactcgcatatttaaagaggcataactcaaagagtaatcactaatcatcttctgtatttctgaaagtttttttaagctttcatcatgactatctttaaaatcgaagttcttaatatttctttccgcctccgcaatttctttcttcagaggcttaatcatttttgctaaaactgtctctctatttggattcctatatgcggcaagatatgccttttgtttttttatctctttattaaattccccttttttctttataagaggtaggccattgaatccaaacaaaaataagtataataaatcgtagacatcaggagttgtattcccatgtaagaaattaagcgttttctgcattttatcattcgtatttctgataaacttatgcgaaacatttctcaacgatggcttatctgtagtcaatccaaacactgcttgagctataaactcagaatattgttttttatctatttcaacatcatttaaaaaatattttgaatttttatcatcggtagatattatacgggaaacaactgcttttttattttctactgtattaaaatctaatgtgaactttaaaacattatcatttattaatgatacaatttcaggtatatcttttccaaattccgcatcatgataaatatcatgacctgatgacataaataaataatccaaaacacgtgataatgtggatttacctacactattgccactatccttacctgaggttcttttatttataattaggttcagaccgtctttaaaaggcacttccctaacaagagtgttattttttaaaataataagtttattgagccgcatatgctattccaccatttccatctaactcaattgcgccgattatgaaaagccaatctaatgagtaaagaaaaagatcaaacgataattcgaagacagaatttactaaatcatacagtcgagatatttcaattatcatcgaatcattactttgaaagatcctaagcaccacacttccaatatatacaggatttgcttttggatccgtatcaattgtaatcatttggattctccagcactatgcattcgataattgaatagctcacaatcatacgaatgccataatcaatgtcttcttgtaaaaactctgcgtctaaattagagcacgaactaaccgtttcttgagcagatctaataacattatcgataatattatctgagtttttcctgatgacttcaatgttaaatggcttctcataaagaccatataaccccaatgcagtattataatagcctctaaactgtctttttaatttgacactaccatttaaaattatagtatcaagtgtttttatagattcatcaactaacagagcatcttctttataaagttcggctacccatctgtttcttttaagatcattgaatgagattttaacatcaatatttgatgcttttctgtttaaactttgctcgccaccaactggattggaaataatctcaatcagcttaccaataacactggctcttaacactcgcggctggttaattatatgtacaggtccagtattatccttaaaattaacgccagaagtcataactacccccgattatcaatattcacaggaccattattatcttgaaaatactgagaacgttccccttgattaatattgtttctattagttgtaatatttataatctgggaatttagatcttttattgtgacattaagttgttttatctcattattcttcttggttacttgtgtagtctgatatattgctatacatccagagatcaccccaacaatatatccaaaggcacttacgtattcgttagcaagtaatgatgctatcatttggaactccatttcaagcttgacagatttaaagttacaacaaattcatactattaggatagcaacttaagaagagtaaatgaacaagtattgatcattctcgttaacatgatctcattcaacatagagccacccatggcctctatctttctcatgaacacgctgtgtagccatgtaggcttaaggagaaaaaattgatgtgcttgctttatcaattgatataaccaaaaaattataatcgtttcacatcattggcgcgcaatgctctccccgccacgcctgcccgcttaatgggtcgcttttaatgcaggtgcaaagatggtctcaggccgcgccacgactggcgctggtctggcatgccggagcgagaaaacgcatgcaaaaccatgcaccttatggatgcatggcttatttcgttaaaaatagcgggatttacgaggattttttgacaggctactgcgcgaccagtccggcgcgtcgacgggtgtaaatcatgttctgtgcaggggtgaatttttcacgattatcatcccgcgaaggcgcgtcaggcctgtatccgatggccgttaaaatatctttatcctgtgcagaataattaatgtcatttccagcggtcagccagacggaaagagcttctctcaggtaagaggctgaacggtcaagcgcgcggttttttatcatcgcgggctggtttttaatccccatcagctccggtgccagtgcggcggtcagctctgcgccgttctgctgcataaaatcatgcagccggttacggatgctgatgcgctgcacctcctcatgcgagaagatgtagcgaccggcggcctgattaacttcccacttttttacgtcaatcaggtcgcgcagcgactgtaatctgcgggaacctgatgcattgtcatccagcaataattcctgatattcctgctctgcggcggccagttcggttttacggttcagccacgcggttttgttcgtctggcaggcttcaaaagcctgttgtaatgtcagggtggtcacgggttgtctctcctgattaatggcggaacggcgagctgtagcagccttttacccgacggggtgcaggggctgttggtaccggcgcgggtttctcatcgacgaccggcgaacgtatcacttcaaagatggactcatgcgttttgaatgtcgccgagcagtgcacattctgacactgcaggtaactttctttgacgctctcagacatatagcggctggtgcggacgtgagccgccgtgcggcagaaagggcagcgcatcatgacagtagcccccgtgctttcaggtcggcttcacgttcccgcattttttcctgccagaatttccgctgaacgggcgtggccgcaacgtcatgctccatatgcggcatcgtggaggccgacagccctgttttaaacagcaccggttcatcggtcagacggatattgcagcccttcacggcctgttcaagccacgctttcacctgctgcattacaactttttccggttcgatatatccctgatgcccggtcgtattagcaagcggattattcagaaccagtatgttgagtttcattgctctgatgagggcaccgcagctttcacgcagggcagcatcaagttcatgctctgcatactgactgaggacgccgtgatgtgcctgacggtatgctctggccgtgcggtcacaggctcctttgagcctgtccagctcaaaagacagtacctcgttcatgctgtcacattcctgcgccagttcccgccgtgccacgcgcgccagatggcgttgtttaagctcgtcggtaatgacagcaccaccggcacgaaaggcggcgcgccatgcgccggaatcattgccgttttcctgctccagttcatttttttgcgtttgcacctggctgatggccgtcgtggtttcatccatacggctggcattggcgagatgcgccgagcgggcagtctcaaggcgttccattgcaggtttaaggtagtcgggaataacagcggtatgagtcatgtcgggtctcctcttcgtttcaatctgaggagattctgccgcgccggacacaacaacacgattcattgccgttgtggcaaaaatggcacaaacagcactcaaaacccggctggccagagaaaggtctcaggaaaaccttactcactgtttgtttttttacttataactattcactactgttcactgaaaagaaaaagataagtaatacagtcagataaagggtgaacagttgagggtgtaactgttcaccgactgttcactactgttcacccttctgtttttatctgccgataccatttagactttattttgattaaaaatcgaaaatatataactaaaggaaatagaaattgctgcattgtaatgcagtgatttgcatctgtttgccagcgtttgcctttgtttgccatagcgaaaagtcaatgtttgtttccacgaaaatctcacatgacctgaggaaaaatatagacataataaggagctacccgaagccggacggacacgaccggcactgtatggactttgtgaggtagcccgatgcacaccgctttttcttccccgtcttccgcccctgccgcgccgttgatgcaggtttctgataccgttcacgagcgctttatccgtctgcccgaagtgatgcatttatgcggcctgtcccgctcgaccatttacgacctcatcagccgggaagccttcccgaaacaaatctccctcggtggtaaaaacgtggcgtgggcgcagtctgaaatcaccgcatggatgactgaccgcattgccgaacgcaaccggggttatgacgcatgatgatgaccattcagcaaacagcccctttttctggcttgcttctttttatcgtttccaggtatagttttcccgctgtcgcaaaatcggcagccgggcgtggaaacccgagtaatctaacggcgacacctgacgcgccatgcgtctttttttgtgtctatgccctcgtgcacctgttacttgcgcaatggtttcatgacctttgcagctatcgagtaatggtggctcaggcggggccgacttcggtcgggccggtatccgttagagccggtatttccacccccgtctgggctaccaccactgagcgtggaaactccggtggtagcataacctgctatctaacggaggttgcccttatggctacgatcctcaccccgtcatacccgcagtttgtctttgtgtttgccgctgttcgtcgcgcagaccgtaaaccccgtatctgtatgcttcgcaccgttgccggtgatgaacaggccgcacgtctttccctcgttcgcgattacgtcctctcgttcgctggtcgtctgccggttgcggaggtgcgcgcatgagacacaccaccattaccgcccgtgacctcgaatgtctggagcatatgcgcaacgtcggccagctcgtcaatgagctgatgcaggtgcaggactgcgccaccgttcgtcgcgacccggtgcagcagtcacagctcacctcggtgatttacctcatgaccgcccagcttgacggcgtggtagagcgctgcaatcagcgctggctgaccggggagggcaacgtatgaaaaatccattaccgcccgtattacgcgccgcgctgtatcgtcgcgccgtggcctgtgcctggctgaccctgtgcgaacgccagcaccgctatccgcacctcaccctcgacgcgctggaaagcgccattgccgccgagctggagggcttctacctgcgccagcacggagaggaaaaaggccgccagattgcctgtgcactgctggaagatttaatagaagccgggccacttaaggccgcaccgtcgctgtcctttctcgggctgaccgtgatggatgagctttgcgcccgtcatatcaccgcaccggtactgcactgagggagaaaataaacatgaaaatgaacgtaacggaaacggtaaaacaggcctgcggccactggtcgcgtattctcccggcgctgggtgtgaaggtgattaaaaaccgccatcaggcctgtccggtgtgcggcggctctgaccgtttccgctttgacgataaagagggacgcgggacgtggttctgcaaccagtgcggcgcgggtgacgggcttaagctggttgagaaggtatttggcgtgtcggcctccgaggccgccggaaaggtgaacgccgtgaccggcaatctgccgccggttgccccggaagtgattgcggccgcagaagcagaaacggaggctgaccgcaaagcggcggccgcgctggccgtcaggctcatggagaaaacccgaccggccagcggcaacgcctacctcacccacaagggattccccggtcatgagtgtgtcatgctgacggccacacacaaaaccggcggcgtgacgttccgcgccggtgatatggttgtcccgctgtatgacaatgccggggcgctggttaacgttcagcttatcaattctgacggtctcaaacgcaccctgaaaggcggagcggtaaaaggtacatgccatatcatcggggggcagaaacaggcaggaaaacgtctgtggattgcggagggctatgcgaccgcgctcaccgtgcatcacctgaccggggaaactgtcatggtggcgctgtcctccgtgaacctactttctctggcgagccttgcccgtcagaaacacccggcctgtcagattgtcctcgccgccgaccgtgaccttaacggcaacggccagagtaaagccgctgcggccgcagacgcctgcgagggcattgtcgccctgccgccggtgttcggtgactggaatgatgcgtttatgcagaaaggtgaagaggccacgcggaaagccatttatgacgccatccggcctccggctgacagccctttcactaccatgagcgaagcggaatttaccgccatgagcaccagtgaaaaggcaatgcgggtgcatgaacattacggcgaagcgctggccgtggatgcgaacggccagctcctgtcccgatatgaggcaggaatatggaaaatcattcccccgtcggattttgcccgcgacgtggccgggttgtttcagcgtctgcgcgccccgttctcgtcggggaaaattgcctcagtggtggagaccctgaaactgattattccgcagcaggacgcccctgcgcgccgtctgattggctttcgcaacggcgtactcgataccgccaccggcacattcagcccgcaccataaatcacactggctgcgcacgctatgtgatgttgatttcaccccgccggtggagggcgaaacgctggaaacccacgcccctcatttctggcgctggcttgaccgcgctgccggtggcaaaccggaaaaacgcgatgtgattctggccgcgctgtttatggttctggcgaaccgttacgactggcagctctttctcgaagtcaccggccccggcgggagcggaaaaagtattctggccgaaattgcgaccatgcttgccggggaagataacgccacgtcggctaccatcgaaacgctggaatcaccacgtgaacgtgctgcgctgattggcttctcgctgattcgtctgcctgaccaggaaaaatggagcggtgacggggcaggactcaaggccatcaccggcggggatgcggtctcggtagacccgaaatacaaggatgcatactccacccatattccggcggtgattctggccgtgaacaataacccgatgcgctttactgaccgcagcggcggcgtctcacggcgccgggtgatcctgcatttcccggaacagattgccccggaggaacgcgacccgcagctcagggataaaatcgcccgcgagctggccgtgattgtgcgccagctaatgcagaagttcagcgacccgatgaccgcccgcaccctgctccagtcacagcagaattccgacgaggcgctcagcatcaagcgcgacgccgacccggcatttgatttttgtggctatctggaggcactgccggatcctgacggtatgtatattggcaatgctaacatcatcccgcgtcagccgcgtctgtatttgtatcatgcctatctggcgtacatggaagcccacggctacaggaatacactcagccttaccatgttcggtaaaggactgccagccatgctgaaagagtacgggctgagttatgaaaagcgccgtaaaaatcagggcatacagaccaatctcacactcagagaggaaagcaacgccgactggctaccaaaatgcgatgaccccatagcgaaataaccttccctgaccggcatcgccggtctttttttacctgcaaaacggcaaaagtgaacagtaaagtgttcactgttcaccgaccattcaccgattaagccactgaatattaaaaataaaaatacctagtgaatagtgtgaacagtttttctaaaaaaaagtttttttcttgatgtgatctatccaaaaacaggttcacttaaccgcaggaagcgctgcaacaaattgccattggtatacgcttaggtataccaatgaaagttgaattggttaaagtcacctaataacagatgattacgtgaattattcagactccgccagcccaccaaacattcattcatgatgcatcatgaaccttaaaaaagcctgtaacttcaatgagttgcaggcttttttgttgcatgtgtggtcatgatctctgtatgaatcttgagcttttggcaccatgtttagcaccacggtatcgtggggctaaaaaagcgtggtgctaaaacatgcctaaccaactgaaacccttaacaaatgtggagatcgctggcgcgaagccccgtagcacagactatgagctacgggacggtgaaggcctgtacttgctggttaagacttcagggaggaaggcctggcatttcgagtattatcatcccgtcaccaaaaagcgcaccaaaaccagccttggcccttacccggtcgttacactggccatggctcgcgaaactcgcacgaaatacagacgactgctctatcagggcatcgatccccgtcaacacttagcaggaatagctgaagaaaaacgcatccagaatgaatgcacgctggaaaaagttgcggaacagtggctcaaagagaagaaacggaccagcgatcttagcgaagatcacgccaaagatgtctggcgctcgctggagatgcacgtcttcccctctctgggtaacacacccgttaccgagatccgcccgaagatgctcaaggaacacctcaccccgctggaagaacagggcatcctcgaaacgctgcggcgagtcatctcacggcttaatgaaatcttccgttttgccatctccgaagagctcatcgaattcaatccggctgacaacctggtcgcccgcttcaagaaaccaaaaaagcagaacatgcccgcccttcaccccagtgaactgggcaggctaatgctggcgctacagaacgcttctatccgcaaggaaacccgctgccttatcgaatgggagctactgacctgggttcgccccggcgaggccgtcagcgcccgctggtgcgacatcgacatgaaaaaagcagaatggcgcatccccgatacctttatgaagatgaaccgttcgcacacggtgccgcttagcaaacaggcgctgcgcgttcttcagatcatggagcccgtcagccgccatcgtccgtgggtcttccccagcatccgcaaaccactggagcatatgcaccagcagaccgcgaacgccgcgcttatccgcatggggttcggcggcgaactggtcgcccacggcatgcgcagccgccaggaccgcaggcgcaggtcattttccccgtgaagtcctggaatctgtgctggcacaccagaaagaagacgagatcgaagcggcctacaaccgcagcgactatctggaacaaaggcgaccgctgatgcagtggtggggaaactacgttgatgccgccagacggcaggcgctgctcggtgcagaagaaccgctgcaaatcgtggaaggagaataatgtgaccagtcccattcgtcagaatctgtttgaacgggaatgtgatatgccgcttctggaagcgcggcatctcgcccttctgcttctaggcctcgatgcttcccaacctgcaaacgccctgccggaagaacatcaggaaaactaccgtatcctgcacgacgccatcagccggaccattaaggcaacaggcatggtcagtgccccggcgaacaagcgcatgttctatgccgatgagatgtttgccctggcctggcggcttattgatgacgaactgacgccgtcagaagtaaaagaccgtagcctgaaggcggtgatgaaactgtcgcgtaatagccgtggccgcaagtggctgaagacgctcggcgacgacgcactaccggatctcacggcttcaacacaaccttccctgcgtggaatgcataagcgcgacaaagcacgggagaatactgcccgactctgctggctgctggttcagcttctggttgaggagactgatgggcgttatgggacgtcggataaaccggcttctgaccagatacttcgaaagctgaagacgctggctaaggaacaggaattgccgtcggatgggcttggacgggggacattttatgaggtgttgaagatggaaagagaaaagtgagtataggtaattgatatctgtgtaagatgcagcgaaccgaataaaatctgaaagctcagacgtatagtctgcttcgtcctgtgagttcaataggttgatgcaacgctatccttaatcaagggggacgttgcttgtgtaacatttaatctacggatattggtcattaatgcgggttgatgttgtactgtcatgattgagcgacctcaggttgagggtggggctcacttatatacgtgtatccattattagtaggtaaattcatgtatattggctacctaatttagccactcctccgcacatagttaactcctgatttgagatagagagggattatgatgctaggaagatttattgcttagcatatagcaggtgatcttttacctactggagtggtaaattacccctatttttcagtgaatgttttgtcagggagtattaatttcgtggaaaacgataaggtgaagttaggaagaaatgataaatgctggtgcaaatcaggacttaagtataaaaaatgccatctcgatcgagaccgtgaaatgccggtatctaaagccgaagccctgaaattttcaaagtctaattcgcagagaaaggcgtgttatgcaccagcatccatgcacgaagattgtgacaaacgtatcgttcaggcgcacacgctttctaagagcagtagccttaaggcgatcgccgactctagtaatcatgttatgggagtggtaatgaacctgccgagcctgataaaaaacaacggaagatgggttccagagaagattggtatcaatcaggcatccacttttaccggattttgtgcagttcatgacagaatattattttcatgtctagagaacgaaaaatttacaggcacggatgagcagtgttttgccctaatgtttcgttcgttatctaaagaaatttacgccaaggaggggggaagacggtcttccgattttgctaaaaatgccgataaaggaaagttacaggccgaacaagtctatattcaggaatttgtcagcctgcatcaaagcggtttgaatgcagcaataactgaactaaataatcttaaaactagcctcgaccgcattctgcttaacagacagttttcagaaattgaaagtgttgtcttcacgttttcagaaccattacccattgcggtttcgtcaattctttcaccggagagggattttgatgggaccaaaattcaggatttgaacgatcttaccgtgtcggcggaacaggtctgcttcaatgctttttccagcgaaggtaagggatatgtagtgttcagttggctgggaacttcagcaattatcagacgttttgtgcgatcactaattaaggttcaaactgacaggattttcaacaccctcctgtattttttcttcacaaaagctgaaaatacatactcatctcctgagtggtgggacagcctcagtgacaaacagcgagagaatatcggcaatatgattatgtcgggtgttgacttttttgataattctacattacgcgtcgatcattcagttgattataactctgctgcgcttgcagagataagatacagcaacagcgagatttccagttgaatgctttaatgccattagaaaaaacgggccaatcagttgtaccgaaattgtaacgataagatgtcaccgccttttgctgccagatcggcatctttcgacaaactgatgtaggctgctgatttccgcttaagcggaggttatcaggttagggatgctatctgcagataggctatagtaactgggtactctccccaattgtaattgacctgctctccgttaatgaacaggtcacaatcgttgtaatgcggccattaggagtttccatcgtagtattttatccagtcacaatcggagtaaaaaataaacatatattctatcaattcactcattaaatttaatctagcctacatacaccagctggttttattttttcagtaatgaaaattaacatatcgatttcattcttcttagggactaacatcgaaaccccatgtacaagactatttctaacctcagtaatttttttaataaaagttgcatcttgcctagaaattattttgttttttactaaagcattgactactttccctataaaaagagggcgattaggttgtttagccgaaaaaaccttatgccttgcaattttttcaaaattaatccaagcagagatgaaacaagtaaagccagatacaaacatatattcttcatgatcaatgtctggcaggtgcccaacaactgaacgaatcatgtcatctggtaagttgaaaagttcacgttcaagatctttcgctacaataactccagtatcaattaagttaaaatcactttgcaaaacaattaattccttgtgcaactgcggtaaggaacccttatatttatcatttaagacaaagtaatattttttaataggacatatatcatgccagtaatcccttaacccttcaaaatcatcttttattttattaacagcagctagtacattattagatgcatcttctggtgcatacacctgataatataccccctgccccttaataaaaccatcattctttctgtctccaatatttccataaggcttcacctgctgaaaatctggcgacttatagtacattatttttgaaaacaagtcctcaaagcgaactccgtcagactcatagacttggagatgaaacatgtttctagcaatagataatgagatatcatccatagtcaaaccttgcataattagagtaaattcaacaacatttacttatctaagttatatgaaacttggcgttaccacaataacagaaaatattaaattgttagttcttctgactgcccctgttgattaacacaccgcaacttaagtaatgccatcatcagtggttagaacagttaacagcttcctcgcttacaactgacgatgagatagcggcagctattgtgaagtgtttgtagtcgtgcgttgccattcgttaaccatagcaaatattatctcgacggagctcaactggataaaaaccatttattttcaataaattaatctaacaccatcagttttgatggcaaagaaaatcttcccggactctttactttctatccggacttaactttttcacccggacctatacctcccctccccgttccgcgctataaccgcctcgacactctgttcccgtgaggtgcaatcatgaaaatccgtgctgacagtaacgatgcttttcccgaaagcggcaacgtgcgtatgcggcaggtggtccagtttctggcgatgagtgaatcatcggtttaccgcctgattaaagacaccgactttccccgccccgtccacctctcttcccgactggtggtcttcgatgctgcggaaatccgtcagtggcaacagcgccgcaccgtcatccgttaatccacgctcagggatgagccgactgataccccatcatgaaacgcgcgccctttctctgtaagcagtctccggaccgcacgctcgaagtggtgatccttgccggaagcctggcatgggaaacctcacgcgtgtggcgaaaagatcccgaccgggaagatgatgttcctccgatggtactcggcccgaatgaactggccgatctgagcaatctgaccattatcaggcccgacacgctctacgtccgggtacttcgcaccggcgatatcagtgaagaagatctgctgaaaattgccgtaaaactggcgcacgcgggtgtgcagatggcccggctgatgagccctgacggtgagttactggagaactggaccgggcagcttgaacgcctgcgacaggaaaggccttccgatatcctgccggatcacttccgcctcgatgaagaggcgctgtggtttgacaagctcaccgaacggcgcgacggcgaaagcgacgtccagccccagcgcatctgttcccctctgcgcgtcaccgccatcacctgcgacagccatgacggcagctatggccgactgctggaatggcacaccaccaccgggcagttgcggcgctgggccatgccgatggcgatgctcagcggcaacggcgaggagctgcggcgcatcctgctggagaacggtctgaccaatatctccacccgccccgccctgcgcagcctgctgtgcgaatacatctcacggtcactccccggacgccgggtcacctgcgtggagaaaaccggctggcacaacggggtatacgtgctcccggatgaagttatcggtcccgatggcgacaatgtcatccttcagggcagccactacctgactggtggctttgcgcaggcagggacgctggcagagtggcaggagcaggtcgccgcactctgtgcaggcaactcgcgtctggtctttgccgtctgctgtgcgctggccgccccgctgttgcgcctgaccggaacgggtggcgggggtttccacctgcgcggtgagtccaccgatggcaagaccacggtgatgaaagtggccgcttccgtctgcggtggcacggattactggcactcctggcgggccaccgggaatgcgctggagggaattgccagtcgccacaatgatgccctgctgccgctcgatgaactgcgcgaagtggatccgcgtgaagccgggatgattgcctatatgctggcaaacggccagggcaaggggcgcgcccgcaccgacggcgaggtacgcaaccgcaggcactggacgctgctgctgttctccaccggggagctgtcgctggcggaacacaccgaacgcgccggggagcgtatctacgccgggatggacgtgcgcatggtacaaatccccagcgacaccgggcagcatggcgcgtttgagcaactacacggctttgccagcggccagcagttcgccgataccctctgcgacagggtggcccgctttcacggcaccgcctttcgtgcctggctggccttcctcacccacgaccaagacgccagcaccacgctagcgagagagttacttcgccgctaccagaacgccctgatgccggacaacgctggaaaccaggtgcagcgcatcgtggcccgttttgccctgctggcggcggccggagagatagcgacgctgcacggcatcacgggctggcagaaaggcacggcgtatgaggcggtgcagatctgcctgcacgcctggctgaacgagcgcggccatattgccaaccaggaagatgaaggcgtgctggcgcagatcaaacggtttatcaccgcgcaccagtacagccgctttgcctcgtgggatggcccggaccgcccgctgaatatggcaggctttcgccgggtggaaaaagatccgctgacgggcgaggaacacacactgttcttcatcctgccggagggctggcgggaaatatgccggggattcagtcccgccagggcggccagattatgccaggaagcagaatgcctgcagcccggcagcgacgggaaataccagtcgcaggttcgcctgccggagatcggcaaaaccagggtttaccggcttacctcccgcatcctcagtatctgagtgcagtctaacgtgtcttaaaaaaaggtggtacagggtgggacaagtggtacacgcagagctggcgagggttacagcgtcccaccttagagaatttgattaaaaaaaagtggtacagggtgggacagccgttgctaaatctgtcccacttttccgactggcatttttcaggtggtacagcgcaaagccacggctggcgcggttgtaccacttgtcccacctgtaccacctcaaaaacagaatgaatgaaaatggcgaaaagggagtgaaaaggcaaaggctgaaaggaagggagaagaaggggaacggacttgcccgaaaaattccgaaacataaacaacatacgaagttgaagcaataacaacaacgtacatttcaagcgcttagaagcgagatttcacgttacagtaacaatttaatatattgatatcattaactattccccttatcttatattcataatataatcattgctaacattaataaaaagtcgagaactgcaatggaactcagaagaatatctgtaaataatttgttcggaattttaaactatgatattgatttagggaactcagaaacaattattattaccggaccaaatggttacggaaaaaccatgcttttaaagataattgacaacattttaaataaaaatatagattttttctttgatttgcgatttgaagaaataaaatttgaacttgacaccatattactatgtatagagaaacaaaaaaataagaatgttgcagttacggtagtcgattatgtaaacgataaaaaacgacaggaagtattcactctaaataaaaacaaagaacttgacgtcgattattttgatgaaatatataataaactattaatctgtgacaacatagattctgatcctatactaaaatcttacaatcatgaggaaatattaaattactataaaattaaaaaataaaacttcataaagaaaagcatcataaaagtgatttcttggataaatccattcctaatgcagagttaacttttatcaaagcgcaaaggatagagaatataaaaaatgaaaaatcagcaatcgagtcacaagcaaatttccttcttgagttgataaaaagagctgctgaggaatcagcacaaataagccaaagacttgactccacatttccagcaagattatttgatagcattaacgaaaatatatcttcaacttctatcaatgacagattgataggcattcagagaaaaagagaactttttatgaagttcgggataataaagtctgaagatacttttatccctagaaaattcagcaatgcaacattaggaaaagagtactcaaccgttttaaatctgtatatttcagatgctttagaaaaactatcaccttatgaagaattatttgaaaaaataaatttatttgttaatttattgaacgaaaaaatgcttgcatttaaagaaatcaagatcagtaacgagcatggattttattttcaaagtgataatggagaaagaatatcattaagtaacttatcttcaggtgagcaaaaccaaatagtcatctattttgatcttatattcaaagctaaacaaaattcagtaattcttattgatgaaccagaaatctctttacatgttgcttggcaaaaagaatttcttgattcaatagcaagaatacaaaaacttaatgagttctctaaaataattattgctacacactcgcctcaaatagttaataataattgggatataacttacgatttattcgagaataacaataaaaacatggagggacaatgaacagcctccgtgatatcaccggtgtttcagactggatatctggaatgcttttgctttttagatcaccaaaatatagcaggaagatttttttcactctagaaggagaaagtgatattagatttcttaatactcattttgcagatgagagaatccattatgattcgccgtgtagtggtaaaccagaagtaataaatgctgtgcaattattgcgctctcatggaaaacaaaacgtatatggtttatgcgatgctgactttgatattttagaaggtaacagctacgaaaacattcattttacggactgtcacgatctcgaaatgatgttaatagaaggtggttcatttgacaaatttatttctgagttcttaaagacaagtatacttagaatacatactcttgaagatatacgaaataatcttaaagaatctataattgacgtgacttacaaaataggaatactaaaatggcttaatttcaaaaataatttattgttaatgtttaaaggaatgaaatacgataacttcataacctttgtggactttagtgcgaatatagacatagataattacattcagcacatcctcgacagaagtcctcgaaaacctccacactgtgatttcaattttttgaaaaaagagtaccaattactttataacaaacaagcagattataaatatgtttgcaatggacatgactttacgtatatcaccatgatggcctttcactcagaattttcccgtgataagaatataactcaagaaaaagttgaatcacatttaagaatagcatactcagcaactgcatttcaaagaacaaatatttataacgaactttcgggcttaatagatagccataatatttaataaattacattcaaaaaaaaaatagcgaaatacaccgtttcaataccgaaatggtgtatttttcagaaaaaaaaccaccttcattaaaattaaatataacccattgttttattaaataaaaacacgagtggatgaacaatcaatgcaaataacctcatatattaccagacaatatcaatgtacttccggggttatttttcttaaaacggtgatactggaggatcaattctgcaagctcatcgtcaacagcataaaaatacgcttccggtacatcaagcgctgctgccagcttacagacgagtttgaaatcgggtgcatggacttccttttcatacgaactgatacgcgcgcttgcggattcttcatccagcccagcgagtgcacccagttccgcttgcgtcagatcagccctgactcttgaaatctttaatcttttaccaatcacgattgcaatcctgcacctgaacatgcaggaattatccctctctgggcagcaaccatcttcaggcattcccttacctattcatgtattacttgaattttgattacatttagagcaatattcaagaattgcgtgatttatcacggttaaaaagagaaaaccgatgaaaaagtcaacaaccaaagactggcaccccgccgacatcgttgccgccttacacaagcgcggtaccagtctggcgaagctgtcgcgggaagcgggactggcctcgtcaacattgtcgaataccctgacgcgcccgtggccgaaaggcgagtggctgattgccatcgcgctcgacatgcatccatcagaaatctggcccggccgttacctcaattccagtaacaaacgtgaaccccgaaaaccgcttcacccgatgacaacaaccgacaactccgggacataacgacccgcgctgtgagtggcaggacgcattaaccaacgacacctgacaggagagttgtttatgcacaccgaaccacaaccatgcaccatcgcaccactcgcaggaggccgccatgtttctggtctccctggctgaaggctttatccacctgttccaggccgcaggcaaaatctttctcgacatgatgaccgggcttatcccgatgctcatctgcctgctgctggccatcaatttcctgatgaagctggtcggtaccgtcagaatggagaaggtcgctgccctgctcggccgctcgcgcattctcacctacggcgtgttgccggtgctcggctggttctttatgagcagccccggcgcgctgacgctcggtaagctcttacctgagaagagtaaacccggctatgaagatgcgctcggcaccaccgcccatcccctcaccagcctgtttccccacgtagtgccatcagagctgtttgtctggctcggcgtggctgcgggggttaaggcactcggtctgcccgttacttcactggcgctgcgctatatcgccgccgccatgctaattggcctgatacgcgggattatcaccgagtacctgttcctgcggctcagcaggcgggggaatgcgccatgatgatttactgcgcacgtattactgccatcgggctgtttgtcgccgacggcctcaccgacaagatgctcatcaccttcgacagcaacgggccgaaggactgtctcgattactcgctgtcgctggagccgtcgttccgggaagagagcctgatgatactccccggcgaccgcctgctgctggcagggcatgattatctggtgactgccgtcggcaagggggtacagcaggcgctgtttgaactcggtcatctgacgctggtgtttgacggtgacctgaagccctgccacaccggggcgattcatctctccggcccggtgccgaaactccatgacctgcacggcaatctggtgattgaggagggacggccatgaacacggtacttattcctcccggtcccggcggctacggtaaagggctttggctgcccgttgccagcggcaaaaaggtgctgtcactgaccgggcgcgagattcatccggtggcgatagaaatcggtgcgctcactgaatcggaagtggtgaacggcttctccgatatcccgcctgataacgacatcctgtgcgtggtgattaactgcgccgggtccctgcgctgcggcctgtatccgcagaagggcatcccgaccatcaatgtgctgcccacctggcgcgcggggccgctggcgcagtttattagcgaggataactacgtctccggcgtgacgatagagcaactggttctggtggatacggccgaagcgccggacggtgaaccggagccagtgtctgtcacggcaccacggattatcaccactccgccgcctgcacgtggcgcggaaaaactggttcgcatggtcgagcgtaccggcaccgccgtcggacacgttatcgccctgctgtttgccgccagccgtgaggcggtggacgtgtcgctgcgcaacgttatcccgtttatggcctttgtctcactgctgattgccctggtgcaggaaaccgcactcggcagcctgattgcccacgccctgacgccgctggcgaactcgctgtggggactggtgctgctgtcgctcatctgcggcattccgtttctctccccggtgctcgggccgggggcagccatctcgcaggtcatcggcgtgatgattggcacccagattggcgcgggcgcgatatccccggccttcgccctgcccgcgctgttcgccatcaacgtgcaggtcggctgcgacttcgtgccggtaggtctttcgatgcaggaggcgaagccggagaccatcgcgaagggcgtccctgcctttctgctctcacgtcagttaacggggccgctggcggtcatcatcggctggctgttttccctgggcttattctgaggacatcatcatgaacaaaatcagagccgccgtggtgggtgcaggtatctacggcaaacaccatatgaacgcgtaccgccataacccggacaccgtgctggttgccatctgcgacaccgatacagaacgttgtgacgaccttgccatggcgtacgggatccagggctacacacgactggatcggttactacagcaggaggctattgatatcgtctcggtggcgacaccggatccgtaccataccgaatccatcctcaccgccctgcgccacggtcagcatgtactggcggaaaaaccgctcgccacctcagtacgcgagtgtgagcttatcgtggagatggcgcagcagcgggacctgctggtcggcgtcgatttccacaaacgctgggacccggcagtaatgcgcattaaagccgaactggaaaatccggagaccggatgcatcctgcgcggccatatcagcatggacgacgtgataacggtcccgacgcagtggctgaactgggcgggcgcaagctccccggtgtggtttctcggttcccactgctttgacctggtgcgccacctctccgggcaggaggtggtatcggtgtacgccgtcggacagaagcggctgatggtcgaatgcggcctcgacaccttcgacagcgtgcagagcctgctgacaatggccgacggcagttcgtggggggtggaaaactcatgggtgctgccggagggctttccgaaggacaacgacgggcgcatcgacattctctgcgaggcaacctatatccgcagtacttcccaacatcgcgggctggaaatcaccacgccggccttgacgctcacgcccaacagctatttcatcaactaccgcaacggcgttgccagcggctttggtatcgacccgatcaatgattttgtgcgggcggtcagacataaagccccctacccggtcaccgccgaagacgggctggcggtgagcaggatctgcgaggcggtacaccgcagccttgagagcgggaaacctgaagatgtttaaacaaacggcgcagggtagctccctgtgccagttccatatgattttgctaattctacttactggtctattcactcgtcaggctttggcccgcagatatattaatgttttccatcctgccgcaacaaaaccccacacacgattgtacgttttttagtcattaaggtgaatagcggtattttatggctatgacctttttcaccttcctgccaatagtatcatgctaaacctctcatttatgtttattgcgccaataatagtcaacaagtatttcaaaaaagtcccaagcaaattataatgctggagtttcataatgtccctttaaaaaccattttaagaagagctattatgtccctccctacaaattttaatgatattcttcgtttttttgaaaaagattacgatacagccaaagaagataatgctttaagtgcacgcggccaatttctgcaactttacccccttaatcacctaaaaaaaatgacgcttgatgactatgtcatcggcaaaggtacagcttcattttgtgcttgtgttgaagtaaaaaccagaacatgggcaaatatgcaaggtgcgacggcgctcaaatttggtatttattatggaaaatcaaaatcagatccaaccgtccgctatcgttttactcagaaatttggcgatgatgatagtactaataaagaagttttcgctaatgttaaagacgctttactagacctaatacagtcagggaaagaattagattttagagcgattgacgagaaccccctatcccaaatgtttaaggctaaaatattgagcctttactttccagaacactttataaacatttgcagcaaagatcatcttaaagaaattgctatggaaatgggtataaaagagcaacagtttattagtaaatatcaacatttgttattcaagaaaaaactagagcataaaatcacccgaaactggagcaatccaaaatatatgtccttcctttatgcccagttcatacgtaaggatcttagcagcgctcctgctgtgatagttaaaaaaccacaaaaaagaaaccatcccgaagtcaatttcgaagaaataacggacaatcgtgatttaataggcaaaaaaagcgaagaatatgcattaaactgggaaaaaaaccgcctaatcggtctcggctattcaaaactagctgaggaaatagatgatcgccgtaatcgtccaacttatggttacgactttctttcttttaatgccccaggtgatgagcgatacatcgaagttaaatcaattggccgggatggaaaagagggagcattccgttttttcctctcaggaaatgaactcaccgtttctaatttaagtaaccacagtaaaaactattatttttatcttgtacagtatgggaaagatggagagccatgcaatctatatgtaaaacatgctcaagatctttacactaatagtgaaatgtccccttgtgcttacgttgttaggttcgatctggaagaacctgcttaatagtttcgacaacctccggctcataactttaaaagtgtgaaatcaggcgcagagttccccctgcgccttcacctcagtgatgctgtaacaacacctgtgaaatcttcctcgcttcacctgccggatccgccgcatgcgtgatcgctgatcccacaatcactacatccgggcctaacagtgcgtagtccttcacagtctggctactgataccgcctgccacggcaatccgggctttccggcgcaccttcaacatcgttatcaaatcatcaatcggtttgcgccctgctgcctgctggtcggtgcctgtgtgtaccgccagcatatctgcccccgcctcctccagcaggcggactcgtgcggggagatcgtcgacgcagatcatatccaccaccacctgctttccggcctcttttgccgcgcggatgcacgactggatcgtcagcacgtcggtcacacctaacaccgtgacatagtctgccccggcgtcgaaaagcagctgcgattcaaaatggccgccatccataattttcgcatccgccagtacttccttatgcgggtatttttctttaatggctttaatcgcgttcacgccttcccgaataagaaagggtgttcccacttcaataatatcaacgtcatcaaccaccttatccataaataccatcgcttcaggcagggttaactcgtccagggcaagctgtaatttcatgttggtttccttgtgtcgaatgactattcgaggttggcgtgcagcgcaaagcctttggttaagcgatatcccgtcgactgcgccagattcacaatcatggcgtcacccagcaccatgaccgcctcttcaaacaggctgccgccgggcagaatacctttcacattctcgggtccatccggcagtttgtcggaataagccgggatcctgaccgccacccccgccagtttccccagcgtggactcggggaaaatggtcagcaaggccacagtgccacccagttgcttcgctttcgttgccacattcaccagcgaagccgtttcacccgatgcactcgccagtaacagcaggtcgcctttttgcagcgcaggcgtgaccacatcgccgacaacatgcaccttcaggccgatatgcatcaggcgcatcgcaaaagctttcagcatcaacagcgaacgccctgcgccaaaaacaaataccgctttcgcgtcagcaatggcctgctccagacgcgccagcgcagcgccatcaatccgcgacatcgcctgattcaggtcgctacaggcaacgcctgcaacagattgcgtttccatcatgcgtcctcctgacagagcgggaataaatcatcctcatactggagcatccccatgatttcccggacatagttatcgacatgccccagaaaatgaaaacgttccggtgcggcgcggtagcgctggtaaagcggcatatcgaaggtgatgccaagatgcgggttctctttgacggtggcgaatttgatgcgcggaacacgcgggtagtagtgattcttgcgcacgcagagctgcccgttctcctccacgatgtagcaggccataccgtggtaaaactgcaccgtgtcgtagtgaaccgtacagggtttatacgccagattgctgaacaccagcggcccgtcgccgatattgatggagcagtggccataattcggcggcacgataatgctctgcccctccttcacgacggccacgataagatcgtctaccaccagctcctgcggcgcggcggcaaaatccggcgacttttgcaggatatacgccgccgtacccttaattacttcatacacctccggatgggtgttgcgccgcgtgtcgttatagccgtgataatggccactggttttcttacgctccttgccaatcgtccccggcatgatgatggtgatgtcgtactgatactggtcagcagcaagccgttcctgatcctccgcaaagctgagaccgcgataaacatcgtaagccggttcattacgcagcccttcggtgaactccggtaaaaccaccgccatctgcccggcgcttttgcggccaaagccgagatagtttagcggcggtttcagcgccattacgccatcatcatcgagatacagcggcaggccgctgtggtgtagctgtttcatttttgccccctgtatacacgtcatacttcaagttgctgctacgttggctgcgcgccttcatcccggtcacatagttatctatgctcccgggaactcacgcgcttgccgccttgctacaactcgaattatttagtgtatgggttcacaatgtccggaaaccggatgcgctttaatcgcgcggatcgcctctttcagccggtcggatttcatgccaaagacgctctgaatgttgttcccgacctcaacgacgcccgccgcgccaagctgtttcagcagcgctttgtccaccagcgtcttatccgtcacgtcaatgcgcagacgtgacatgcaggcttcgatgctggtcatattccccaatccgccataggccagaatgatgccgctcaccaggtcgttctgttcgctttcctgcgccacagcggtttcttcgacttcacggcccggcgtcagcaaattccagcgacggatggcaaaggtaaacaggacgtagtacaccgcgcccatcaccagcccgaccgggaataccatgtaccagtgaggcgctcgcggcagaacgccaaagaagagatagtcgataagcccgccggagaaagagagcccgatgtgcacgctgaaccactccatcagcaggaacaccagccccgccaggacggcgtgaatgccatacagcacgggtgcaacaaacaggaaggagaactcaatcggctcggtgataccgcagacgatggaagtgatcgcgccagagagcataatgcccttcacacgcgctatgttttccgggctggcgcagcggtagatcgccagcgcaatcgccggaatacagaacatcttgatcggcgtcagcccggccataaaggttccggcggtaatcggcacctgatctttcaactgggcaaagaagataagctggtcgccatgcaccacctgcccggctttgttcacgtactcgccaaactgcagccagaacgtcggccaccagacatggttaagaccaaacgggatcagcagccgctcgacaaaaccgaacaggaaggcggacacgcccggcccctgcaccgtcatggtattcgacaggccattaatcagatgctgaaccggcggccagaccaccgccatcaccagcccgacaaacagcgcggcgaaggaggtcactatcggcacaaatcgcttgccggagaagaactccagccatgaaggaagctggatgcggtaatagcgtttatacagccaggcggcgataatcccgataatgatgccgccaaacacgccggtctgcagcgaagggatgcccagcaccatcgtgtagtcacgcacctgcgccaccgattcgggcgtgatccccagaaactggccgatggtgacgttcataatcaaaaacccggcgatcgccgacagcccggcaatgccctgatcgtcactaagtcccaccgccacgccgaccgcaaacagcagcggcaggttggcgaaaatcgcactgcccgcttccgccatcagcttcagcacgtgaaccagcccgtcagtgccgagaaacggcaggctggcgacaatattgggatcctgaaagctaacaccaaaagccagcaaaataccggcggcaggcagcatggcaatggggatcattaacgatcgcccgatgctttgtaacatttgcagaaggttgaatcttttcatctcgatctcctgagcgcgtctttatgacagggattcgcacaacagcaggttctgctccgaacaccttcagtatccgaacccgaaatgattaaaaaaacagcaaccaaagacgaaagttatttccggttttcgcttaaaaccggaaaatttatgagggcaatcacgccagataccgtcagaaagggataaaagaggaaatcgcgttcggcgggaggccatcatatgagtatcttcgaggcgcattttcgcaggctgcacgcccgctacggcgcaggtcagacgcacgaattacagatgcaggagatcgccgccatcttcggctgttcggtgcgtaattgtcgtattgcgctaaaaaagatgcatcaggaaaaatggctcgactggcagccccagcgcgggcgcggcaagcgctcacggctccatctgttaacctcgccggaaaagctgttcagccagaacgtcaataagctgctggagaagcaggattacggcaacgtgctgcggtttatcggcaacgacaagtatctgctggatcgcctgagcctgtggcgctttggggtacaggataaaagcagcgaaacgcgggtacgcatcccctactatcgcaatctggatccgcttaacccactcgtccccctgcggcggaccgaacgccaccttctgcgccagtgcctgagcggactgacgcgctatgacgccgttcagggcaggatcgtccccgatatcgcccactactggacccataacgaggactttacccgctgggagttctggctaaaatccaccgcccgctttgccgatggctgtgagctggatgccagcgccgttcagcgctgcctgctcgccgccagccagagcccgcagttcgcgccgattttcagcccaatcaaaaccattaccgctgacgccccctggcatctggtaattgaaacgcatcatccggtcagacggctcgactgcctgctcgccacccagccgacgatgctgtttgattaccagcacggacacatccgctgtaccggcgctttccacctgcaggagcacagcgacaattttatggttttgcggcgcaatcaacactggcatcaggcgcgccccggactggatgagatcaccattttcacctgggctccggagcatatcagcatgagctttattcccctgctgcggggcgaagaggtgcaggatgaccgcccgctcaacgagcgtagtctggagcagagctgctgctttgtgctgctcgacggtgacggtgcctttgcagatgaggccggaagacggtttatcaattacctgctgcaacctgtcgaactcctcagccagacgcagcttcccgacgaatacgcacgcatcctctctgtggctcagggtatgctgccgcagtggaatcaccgcccggtagattttggcgggatcacagcgccgtttaacctgcgtcagccggttattatcagcacctttcagcaaccggaactggtggagcttgccggagcaattcgccgcctgcttgaacgctggcatattcgcgccgaaatacggatcgacgcatttgaccactttaacaaccagctgcgccctcccgcggatatctggctcagcaactttatgctcgataccctttcggttccggcatttctggaatggctagcttccaccgcgctgtttacacgactgcctgaatcccagcgacaaaacctgaacgcgctgttaccgacgattctaaacagcgacgatgaacaggcgttcgctaccattgccgcctttttccatgagatgacccaccagcgatatgtcattcctttgctgcatcactggatggaatttgcgactgagaagtcatttacctggcgggatttaaatacgctgggatggccggatttcagccaactttggctcgaataatgctacgcccgcaaaagctcgctaaagggcctttaaaggcctttaagggtaagggagataagtgcgccattgtggctgtcaattcgttttgtttagctcttcctgattttcttcttgcctgggagaactggcatattttttcgtttctggatccagaggagctgcgtccggcatcagagtaacattccgcatggtgcgttagatcattctgcatacccaattctgttcgtttaagtattttaggtacggctgagatagcgtggtttgaaccatcagaacaattaaaatctacacccgcaaaggctcgctttagcgagcctttgcgggcggcatttctggataattatccatgaaagcctcaccagagatgtaaaagaatccttcctgccgcggcattctctggacaatattttcccaatcttctgatgctcatgaaaccgcatactgcatcatgataataaagttatttattatcaatgaattatgcggattaaatcagcttgaccatcgcatcaacaatgctatttttacggtaactgccgcagtcctgggactgcacccgagacagccacgaccttagaggactgtgcctggctgctatgtcaggttggtcaagcccttaaccccgcaagccggacaatacggcgggggcgtctctgacgcagtccggtcgttgttgctgctataacctgtgccagtaagaggcaggttggtaccgcctctttagacggagcgtatctctgcgccagtaaacaggttgcctgaaacggcggcgcgtcactttggaggcgaagcaaaacaaagtgacgccgacgcacaccgctgcgccagccgccgtcttatcaggcttatcgttgtattaaccctctgacgccatcatttctgcgtcaaaaagataacaaggaggaatgaacagtaccggaggcggaccacgacgatccgggggcatccctgctgaggcaggcggcctgcacaccgtgcagtaccgtaccccaccatacctcaactctcgccttccggcgcaccggtattgtttagcatggcgcagctttcgctctcccatgcattccccacgcgccggaaaatattgctaccgcatcaggcggaggagtcagcatgtcgcgactggcgcaggatatgaaaaaactggcgcaccgcgcaggtggcagccacaaaaccgtccacgaccgcgaacagatggcgcagcgttttgcccgtcatttgctggcgcagaatattcaggtcaccagcacctgccagctcaaagccagacacatcgcgggatatattcatgaatggctggcgcagggtatttctctgcgaacgctacagaatgagatggcaatggtgcgctctattctggctgaagccggacgcacacaactcagccagtcagaattaatcagcaaccagtcgctcggtatcagtggtgccagctgtgacgggacgcaccgggccattccggatgcactttaccatcaggtactggaccgggttcatcatatcgacgcaggcctcgcagccagcctgcaactggcgcgggtgatggggctgcgcggtcaggaagcagtacagtgctgccagtcgctgaaaacctgggataaacagctggaaaaaggggctgaacgtctgccggtgatcttcggcaccaaaggcgggcgaccacgcatgacacaggtgacggaccgggaagcggttcgtcaggcagtgaaagaggcgcttgggattgccggggagcgtaacgggcatctcattgacaagccggatctgaaatctgcaatggactactggcacaaccatctccgcgataccgggctgacgggggaatactctccccactccctgcgctatgcctggacgcaggatgcgatccgctattacgaagagcagggtctgagccataaagaggcgctggcggtaacttcaacggatctgggccatggtgatgggcggggaatatatattgagcaggtatacgggtatactgattgaatctcactaatacaagatgtttcattcctttttgtatgtaaaaattcataactactttaaaattttaaatgcacaataaaagtatagatagataatgtgtactgtttccatttcaccgcacttgagtttaaaataccaagattcatctaaaaccaagattgtgtcatgaaaatttcatatttaaaatcatctccgtcaatgattgaagttttaaaaaataactatgaagcatttataattcaaaactataaattcaatcacttaggtttatttcatgacgaagacagtatttatgctgtaatacagaattacaaagaatctaatactacgttagatgaaatacaagaactttacaactacagatttaaaaccgcaggtgttccgggaccaacgtttacagaagaagtaaaagacaactatataaaaatagatcttagaaatacatatgaaaaagtaagtttatttggccaaccatttaacgcattcgaatttaataataacatacgcatagccataccatctaaatttcatccttttcatgttgacatgaagtggtccgacaacagttttacatttaccttcaataaagaacttactcctaatgatattgatgaaatcattttaatatgtgaaagcttaggtttttatggttataaatacaatattaaaacagaccatgaactacctgattataatcatcaaataaagaaaagtaatacacaaggaaatcttacattagttgcgagtcaataccttaggaataatcaacctaaagaaatcttggagaaatatgaagaggatcaagacttttggacagaaaaaagagccaatattttttcagatgtcaatctaaccaaggatgaatgtcttattgattcattcagaaagagtcaaaacagatgctttgtcgatgccagtgtatttccacgaaataacataagagaatatatatcactgtatgacactgtaatcattgcaattccattagcagattcacccaatagtcagagtttttatgacatttttaaaataagcaagattgagctgttagagttagttcgacgtggacgtataaaattcgtcgcattccaaaatctccagcggtatgattcaaattttttggcggatgttctgtctgttgatccagaatgtgtattattttcaagaagattagccgccgcgacattattagcaattagagaaaaaacaggattatttggattcgcatttgatagcagcactcaatataacttattgaaagaatgctacaattcaaaagtcgatgcacttaaaatattagcagagtcgttatcggaaaatatagcattttttgagtatggcataaatcaaagaggtgcattgggtattagtcaattttgtggggcaagctttgcagcccaaatatataaatcacgcggtcgcgattatggtattgagctaatgacaagcgcaatgtcacttgagttctcactagggctaggggcacatcactttccctttgagcacacaggttattctgaggtaaatgcctgtaaaatccttaatggcatatataatggagttcagcaatcacaaaatgaacttcgagaaatggagatacagactttactatcaaatattttcactattaataacgacatgaatgttctcgagttagatgacatcttaagcaaatacagtcgacgtatgatcccacaaatattacaagagtatgcccatctgacacctgaagaattaagctttaagatatactctctaaataaagatattaaagcaattgaaaagaggaagcaaaacttgtctattttagacttgtcaggttttgccccagtagttgcaggggcagtaatggagtataagggactatcgggagcgggttatattgcgttgctaccatggattttcaaattattaaaagtcaccaccaataattcaaagatattcagcaatgaaatatttagtaatttagaagctttaactttaaatactccaagaaacacaatgttggtacataaaataagacaagacatgcctaaatagtacgttttaattcgatgcattatactatttgcacatcaaccaagcccatacgaatatatgggccataacgatgctttcacaggtatggccatttatttggcaaattttaaatcagatcgtttaatctttttttctagtatagcaactatttctcttaacttttttataagttcaataatcgccctacattgcatccatcacaaataaaatgaattgagaatgagttcattgaaaaaatctcatcaattcataatgtaatttagtgatcttttgaagaataaccctcgatctctataacaacttctaaagtatacccaccattctggcttgcaaaatcctctttggtaatagacacatagcgattatctttctttatcataactgggatcttactaaatagctcattaatattaaagtcatcatcccctaatgcttttgatattaattcttccgcaagcaatgaaatggtattttttgaacaatttgatatgggtgaattatttatattagctcttaacttgagtttcttagcagcatattcatctccatataaataatatgcaacactatcacgaaataaaccatcattaccaatctcaatcatatgactacatgatatccaagtatcaaaactgaaatgataatcattggtgtcaactccttttccaacaagaaaatctttggctaagaatggtgaccacccatatttattatctacttcgggtggattagattcgatttttttccgtaattttacgtcttttaaacttgccttaattccttctttcgtcttaatttcattaatatgtatatttcttacccagcgattaagagcatcaagatctgttctaaagaagcaaatcgctaatttttttgcataattaaacagagcctcatcgtcaaaatatatttttaatcctaataacttagtttcataagcttgataaaggtaaagcatataaataaatggcataaacgaaaatgataataaaactggcgtcagaagttcagtaagattagcccaagaaaacgttaccgaaggcgacataattgaaacaaaaaatgaatgggcaaaataaaatataacgaaaacgcctagcactacctttatcgtcgctccgattttttctgtttcttttttcgtattagctacgacagccagcaaccctaaaaaaagcataatagggtatattataaactctatagcaaaggaaaaactttgtagttcaagaataaatgtaagtagagcacttaatccaatcgtttctttgatttgtgatttaaaataatacttactgctctttattttatgtgtttcaaagattgttacgaaagcatatgtaattacccataccaaagtggtcttaagattatctgtactccaaacaccaatttcataaaaaagcacaatacaaatagacgtccaaacaaccgcaaatcctaatactgtcaaaatttgtttatggaaaaatgttttgataagttgataaaaagaatctctaatatcctttttacaccaaagcagagcaatgattattaacatccatataacaaaagcatactctctactattaatgtccatttagtcaccattactcagttaaattcatttcaaagttacattttatcaagcctttatcattttaaactgaattacggtaggcgtaccaactttgtataagatagaatacaacaagcttcatgcttcttttttagatagtttgttgttcgtgcctatcgtacactttgcgactgttcgttttgcatctattccaagcatcaatcaatacaataaatttcagcaccataaagataataataaaaatcaacaagatacgaaaaccccttccatatcaacatcatcaccaccctttttgcgccttcccttccccgcaaaaaataaaaatctccaacaaactcaaccatctcccccaccaattacaaggacgccagccactttttagttgtttgaagttcaatgaagtctactaagcccgcacagcacaagctctgcgggcttttttacgtctattgtcgtccagtgagaattgctgagaactacgagttatggcaccctgaatgagacccactaagaagggtccaaaaatcgagggtcccaaatggcaaaaatcgctaagaagctcactgacactgaaatcaaaagcactaagccagccgataaagaaatcaacttgtttgacggtgatggtctgattctacgaatcgctcctttggcgaagggagggaagaaaaattggtatttcagatatgcagtgcctgtgaccaaaaagcgaactaaggtgagcttaggaacctatcctcatcttacacttgccaaggcacgagctttacgtgatgaatacttgtcgttgcttgcaaatggtatagacccactagttcataacacccagaaagccaatgccctaaaagatgcaacggaacatacatttcaagcagtagccaagaagtggcttgatgagaaagtcaaaacgtcaggcatctcccgggaccatgctaacgacatctggcgaagtcttgaacgaaatattttccccggtctgggtaatgtgccaatcaataagatccgtcccaagctcttaaaacagcatcttgatccaattgaacaacgaggagtactggaaactttgcgacggctcatttccaggttgaatgaaatcttccgttgggcggctacagaagagctgacccgcagataatctgggccaacgtttcagtaagcctaaaaagcagaatatgccagccctacccccctctgaactccctcgttttctggcagcactgaacaatgcatctgtccgtttagaaacaagactactgattgaatggcaatataaacagacccgttttagttccaggcattttttgagatcccggtcaaatgattgtgttgccgatattcctccggcgtcatattgttcagtgattcatgagggcgttcacagttatattctgacacccatctttccgtgatttcccgcacttcattcagcgttctgaacagataaaaatcgagtatttctgtacagtatgttcggttaaagcgctcaataaaagcgttctgcgtcggcttacccggctaaataaattccagttttactgcatgttgctctgcccattcagccagtgcaagtgagataaattccggaccattatccatgcgtagcatgaccggatagccgcgatttgccgcgatttgccgcgatcctgtcgagtacacggaccacgcgcaaggctggcagattcagatcgatttcaatcgacaatgcctcacggttaaagtcatcaacgacattgaacgtgcgaaaacgacggccacagaccagggcatcatgcataaaatcgacagaccagctctggttcagcgcttccggcgtggccagtggcgaggggttacgcaccggcagccgttgtttgcccttacggcgaaaatccagcttcagcagacaataaatacggtggatccttttgtgattccacatgtatccctgccgccgcagaacctgaaaaagcttcggaaaaccgtatcgtggataccgttcagctgccgcctgcaatgcggtaataacgggttcgtcacgtgtgttatccggacggtaatgataaaccgttctgctcaggttcaggctccggcaggcctgacggatactgagtccgaatgccgttatcagatgagtgaccagctcacgcttaaaggctggttttaaagctttttttcgataacgtctttcagcgcccggttctcaaggctcaggtcggcaaacatctgtttgaggcgtcggttctcgtcctcaagatcttttatctttttaatatcagaaggttccatgccgccgtatctggacttccagttatagtaggtggcttcagatataccggcctcccggcaggcatctttaacggttcgtccggcttcaaccgatttaattacggcaatgatctgatgctcggtaaaacgggctttacgcatagcgatctcctttgttggcagattgattatgccggaggatctctaaatgtgaatggcacgattatgcgggatacttacaatggggcgtggaaaagactcttaggtaattgttgtctgttgtaggacatagcggcaggttaagcagtgaaattaggaatagttagcttggagttagatgcagacgttcttcagatactatttcagattcagttcgtgcatgtctgcagtaacttctgcaatattaccagcagacagtgagcaaatgtgtgtctaggcatagaatccgcatctccccacgcctgcgggacagtatccagagcggactaagttacttagatatctggctggcaacggaaacggtgagaacaatataaaaatgcatttatcaaatttaaataaaatgattgcttattttcccattactaatgagcgcccaacagggcgcttgtgaatcaggtcagatatggccgatctttactgacatcaaacaagtccaagaaaaatgtatcgcctatccgaatattagaaccaatctttacattagtagagttgttgcagaagaaatcaaagtgatatcttggatgcactttacccctagcatttttaagatcatcgtcaaatctgaagtatccgtgatcaactaaaagcaatgaagaaattgcatcacaataatttattgcctgctgaatatctctatcaaagttatcacataattctacagcaatggcctcgtaagaaaaggagccattaccgcaagtagcaattacatttctgcatcgggaaataaattcagcattaacaggaagagcataagcatcataattaaagcagatattgctttcatactcgattacctgaaaaggtaagttcatagtaaaaaaaccatctgttttttttaccaatatacgcttatgtgtacctgtgcttattaataaatcgaaatcctttgtttctttattccaggactcatgacatgtgtttaatatctctgcggtaacaagcagattttctaggttagaaaatgcatcccttacagcacaaaacttgtcaagatattctgctggcacgttattgaaaaagtaaaggctcatagttttttgttcctttcatattctatttcaatcaagcctttaatgtattccccgtcagcatcatcatcttccgcaattatcctttcgactcgatcagttatttttgctattagtcgaggtgtagacttcttgtctgcgcaataacttttaaccatctgagaaattgaaaccgactcatctagaacaataaaatctttttgactttgtatttcttcatctgaaggaagccttacatccatgtagttgttttcattgagaaagttcagaccttcgagaattgtagggattgccggattttcattatcattatttaaaactaagtgactttctaaaaatgacctcgccatcatagtgtagagtgcatttcgaaaattagctctcttcaccagtttcatggcaaaacaaataacaaatggaaattcaagaccttttgcattatttatattagaaataaaaagtttaccatcttgctttgattttgtttcatgtgagatatttgaatcccacccaagctgttgttttacttttgattttagcgaatgaatgtactcataaatataaccaccggcgtcaagaaaaataacagcaatatctccttgctctaaagatggattgcgttccttaatatcgattataatatcaactattttatctggcccattatctgttccttctaacaaatgaacagcagtacttttatgatttttgggaatatcttcaaaacgcctcaaagggtctcttgataaatggactctatctcctacttttttatatttatacccacaagaatcccattcaggctcttttaaccaacgcagaacaggttcctcgtagagtcccattcctaaggcatgagaaaacatcaaattcttaggatctgtgcggtagcattttttaagaacgatatctgctcgattcacgttatcgctaatcggcatgaaaatattttggaaaacgtcacctgctacatataattttttagaagtaaccatttcacagagatcaatgaagctttgtgggaagtcttgactttcgtcgataaatacgtaatcaagtgcctttttatcagctctcccactattatttatatctgcaatggctttcttacatagggcatcaaaatcgccattaccaaatcccccaaatggaatttcgtaataatggcatatatatctgtacattccagaaaaaggttctttagtcaaaccccaagagttgaagcaaaaaagttttgtaccccattctatctgtttttcgactcgcataaaatcgaaaaactcagggattctggttctcattgtggaagcgagaattttattaaagcaagtaaatgcaattctagaatcagggttttttgaataaatctcttttaatttgtgtaaaagtaattcagttttacctgaaccagctaatccttgtattacactcttttttccaaagccactctggaagacaaactttgtttgatccgtatcaaataaaataattttggattttattgtatctaataaattatttgcttcaaggttaattcttgatgtgtcgttaatactaccaacaataagtgagataattaaatcaatcaccctactttctttagtttcgacttccagttttttgaaatcgatatcattacgagaaagcgattcaaataaaatttgccacgattttttcctgccgatcttatctcgatacttgaatttctccgctaaataagaaacatcttcgagaaaatcttcctgatactcctcaaaaagatcatcgtcatccccaaaatctataaaaaaaggttttataccagaagaaaatactgcaatcgctcggtcataatcatactttacatcctcattagatagaggtctgcaaagaatatatgtttgttttttatgctgctcagcatagctgtttattattacatcaacaccagcactttgagccagagctaatgcatcctgagagtaaaagcagtagttggacattaaacttcctctttagcgggttgtctactcatttcaaattcttagttgtgtgctgtgcgagctaatgactgtctttgttctgaatcatactctttacacagaaaaaaaacactttgcagcttcgttaaggtggctcgcgttccgataaactttagcctgctctgcaatgtcgtatcgtaagttattcgttgggatgagagggtaaacctacctgatcttacccagcaatagtggacacgcgactaagtgagtaaactctcaagtaagaggtgactcacatgacaaaaccagcattaaccaccaaaaagccacgcaagcagcacacgcctgaatttcgtcaggaagccctgaaactggctaagcgcattggtgttgccgctgcagcccgtgagctcagcctgtataaatcacagctccacaactggcgaagcaaacagcaaaatcagctctcttcttctgaacgcgagcaggagatgtccgctgagatcgcccgtctgaaacgtcaactggcagaacgggatgaggaactggccattctccagaaggccgcgacatacttcgcgaagcgcctgaaatgaagtatgtcttcatcgaaaaacatcaggctgagttcaatatcaaagccatgtgccgtgtatttcaggttgcccgtagcggctggtacgtctggcatcagcgtcgtcatcagataaaccggcgtcagcggttccgccttgtctgtgataacgtcgtccgggaagcattcagtgacgcaaaacaacgctatggtgcgccacgcctgacggatgagcttcgtgctcagggttaccagttcaacgtgaaaaccgtggcggccagcctgcgtcggcaggggctgcgggcgaaagcctcgcgccggttccgtccggtcagttaccgcaaacatggtctgccagtctcagagaatctgctgaagcaggacttttacgccagcggcccgaatcagaagtgggtgggtgacatcacgtatcttcgcactggtgaaggctggctttatctggccgtggttatcgatctgtggccgcggtcagtcattggctggtcgatgtcctcgcggatgacagcacagcttgcctgcaatgcgttacagatggcgctgtggcagcgtaaatgtccggaaaatgtcatcgtgcatacagacagaggcggtcagtactgttcaacggattaccagagcttactgaaacgccataatctgcggggaagtatgagcgccagaggttgttgttacgacaatgcctgtgcggaaagcttcttccatacgctgagggtggaatgtatccacggagaggactttgtcagccgggaaataatgcggacagcagtgtttaattatagtgagtgtgattacaatcggtggcgtcgtcacagtgcctgtggcggtctcagtccggaacaatttgaaaaccagaacctcgcttagggttgtgcccatattacgcgggtaggatcaagcttccttcagtcttttggggatcataccgtgcaccttatagggatttcacggtaatatttagtaatgctcaagttcttttatttttagatttcataaagatagaaaccataacattaaaggggggtactaacacgaccaattaacttattatgcaccttttccactgcacccgttttcccccatatagcttcagcattgcatcagcaaagctgtcatccagcgcgtagaattaaccttcaggcaaattgagaacttcagcaaatcgacaaaccagttcgaagtgagttgggttatcaacccacaaatagcattaaattagacactatgtaaaacttggaacccctacagtatcacagaaggcgttggcgtacccattgagccaaatttgagccttcataaaaggcctggtaaattttgggattattgggatcgatagctacggcctcttacatcgcttcaactcgttcggcaagcatgaatgaagagtaatcatcaccagacgacaatagtgtaactgccctctttcctggactgttccggtatcccaggagaaagtactttatcagtgttcatctctcttatgatgcccgtgaacccaaatgcgtcgcggaacctacttttaccttcttctgacaagagcaagagtctggcacgatgaataccttccatgacctccgttcattaggtcccctccggtagccccctaagttttacttttctcacggaattttttattaccgtaggcgttattcagcgtagtccgaagacgtgatcctgctcacccagtcaaacataacttgcatatgattgccattggatgtcctcacaccaacctgacacgcatttacgcctgtcgttttgccagtcaaaacctgtccatacttcatatagattttgataccgactccctgtttatagcacttattgcaaatcgagaaataatctcttcttgatggagtatattgctgaagattaaatccgtcagccggcaccagcgaaagattaaaagcgtcattacctgataattcttcaagaattgccagagactctagtttaacttcaatgcgcttatttcctttaggtttatccgaagccagaatcaaattttccttcggattaaacttcgcaatgtagcctgtgattatccgggcattattactcaccaatcgaacagggatatcattaaaacgtagaaattgaactcgacgagcaagcatagaataatcccgcggccatatttcagcttctcgcccgtaggaaatatcatttacagccatacattccataaatatatattcatctatgctaaatgaaaaagccccgaattcacggggctgaataaaacgaaataaattaacgtaacagagacagcacgttctgcgggacctggttagcctgcgccagaacggaagtaccggcctgctgcagaatctgcgcgcgagacatgttggaaacttcggtcgcgtagtcggaatcttcgatacggctacgcgcttcagacagattgtttacggtattgcccaggttggtgatagcagagttgaaacggttttgtaccgcacccagatcagagcgcagcgcatccacctgcgccagcgcggcatcaattttctgcagcgggttttcggtggttttagcggctgcttccgccagctctggttgtgctttgaaatcatgaccagcggctttgctggcattgtaggttttaccgtcgatagtaacgacttcggttttaccgtctacgccacccagttggttagccgctgttttggtagtgccgtcagcagcagtataacttgtggttttagctttaattgctcctgtcgcttcatcgtaatctgcggcgtaatacttatcgccagctttaagcgcataaccgccttcaattgtcttaccatttttatcggtataagacattttgaccaactcagcgccattagcatcggtagcgtcaacgccgccagcaattaaggcatttttagcatctgctgaaacaactgccggtgtatcttttaactcctgtacttctgttttagttgtcgcaccagcaggcattgtggttttagttgcgccagccgcaagggttactgtaccgtcagtagcaacgttaacttcataatcgccatttttggcggcatcagcaccagtaaagccaccaatagtaacaaagtacttgttattatctgcgtcaaatttaaccgcaccaccggttacagaagccgtaccattcgtaccccccgtagccgctttaatagctgcatcatcaagacccgatacatccagtgtagtaccattattggcataagctttcgttgttactgctgtatctttcacatcatacgctttctgcacgttcagtgagtccagacccagggtctgagagttgatctgcttcagatcgatatcgatagtttcaccgtcgttggcgccaacctggatggtcagggtgttgtcctgcgccaggactttcacgccgttgaactgagtctggccggatacacggtcgatttcgttcaggcgctgggtgatttcagcctggatggagtcgaggtcagactgggagttggtgctgttagcagactgaaccgccagttcacgcacacgctgcaggttgttgttgatttcgttcagcgcgccttcagtggtctgcgcaatggagataccgtcgttagcgttacgggaagcctgagtcagacctttgatgttcgcggtgaaacggttagcaatcgcctgacctgccgcatcgtctttcgcgctgttgatacgcagaccagaagacagacgctcgatagcggtgcccagtgcggactgggatttgttcaggttattctgggtcagcagcgacagactgttagtgttgattacttgtgccataaaattttccttttggaaggtttttgataaagcaatcctccatgagaaaagcgactaaaattcttccttatctgatgtaaaggagaaaatcatggctactattgggtatattcgggtgtcaacaattgaccaaaatatcgatttacagcgtaatgcgcttactagtgcaaattgtgaccgcatttttgaggaccgtatcagtggcaagattgcaaaccgccccggcctgaaacgagcgttaaagtatgtaaataaaggcgatactcttgtcgtctggaaattagacagactgggccgcagcgtgaaaaacctggtggcgttaatatcagaattacatgaacgtggagctcacttccattctttaaccgatagtattgataccagtagcgcgatggggcgattcttttttcatgtaatgtcagcactggccgagatggagcgagaattaattgtcgagcgaacccttgccggactggctgccgccagagcgcaaggacgactgggagggcgccctcgggcgatcaacaaacatgaacaggaacagattagtcggctattagagaaaggccatcctcggcagcaactagctattatttttggtattggcgtatctaccttatacagatattttccggcaagccgcataaaaaaacgaatgaattaaaataaaaattacaacaggatggatataacatttttgtaatacaggcgtgtggcataaataaaccgaaagggtatacaaaaaagacagcatctaattaaaaagagaaaaaattcaacgtattaacatatatagtgtaacgcgctcacgataaggcctatgttacatccagctatagacgacatcgctcaaaacactaccagacacagtattcacctggaaaggctttttaatcaaaatgttagatgtaagcaattacggacagaaaaaatagtaaagtttatgcctcaagtgtcgataacctggatgacacaggtaagcctggcataacattggttatcaaaaaccttggttttcaagaaccaataaatcgtgtggctgatgcgctataaaaatcgcagagcggtgacgatattccgcataaggagctgttcgttcgcaacattcgaacggtgacgttaaagccggtttcattggctaatgaagacgaaggggacaaaattcctacagagttgataccacagagatagtccaggctcgcaggtgatacgggatttaacgccggaaagtctgcacagaacacgatctgccgccggacaccattaaattgccccgcaacgtgttatcaatactactccctacgtttcccgttaccttgctgtcggtacgtttacctcattgtctgaaaggttatttgcgaagttatcattaataatccacgggcgtctggtatgcgaatccagttccccaatcctggcgctttgcctgtgcgaccatacgcgcgtaaataagcctgaaaccaaacttcaccgcttaacgctctcatctttcccgatttttacgcaaaaaatcatcacatgatcaagtgtcatattagttattgcattttacaaatgatattggtaattattatcattctcattaacgacttgttcgatttatgacgtggagagagaggatttctcatgcgtattctgtttgtcggtccaccactgtatggactgctataccctgtgctgtctctggcgcaagcgtttcgtgttaatggccatgaagtactgattgcaagcggtggcaaatttgcacagaaagcagccgaagctgggttggtggtatttgacgctgcgcctggtttcgattcggaagcgggttatcgccgtcaggaggcattacgaaaagaaaataacattggaacaaaaatggggaacttctcattcttcagcgaagagatgactgacccgctggtcgcgttcgccgggcagtggcgaccagatctcatcgtctaccctccccttggggtcgttggaccactgattgccgctaagtatgacattccggtagtgatgcaaaccgtcggcttcggtcatacgccctggcacatcaaaggcgtgacgaaatcactttctaacgcctaccgccgccatggggtcagcgcgccaccaagagatctggcgtggatagacgtcacaccgcccagcatgagcatactgcaaaatgacggagagccggttatctccatgcaatacgtcccgtataacggcggcgccgtctgggaagaatggtgggaacgtacacctgatcgcaagcgtcttctggtcagcctcggcaccgtcaaaccgatggtggatggcctggatctgatttcctgggtaatggattctgccggcgaagtagatgccgaaatcatcctgcatcttccggcaaacgcccgctcggatttacgttcactgccgccgaatgtccgtctggtcgactggcttccgatgggcgttttccttaacggcgccgacggttttatccaccatggcggcgcaggcaacaccctgacggcgctgcatgccggcattccgcagatagtctttggccagggtgccgacagacccgtcaatgcccgcgccgtggtcgagcgcggatgcggcattattcccggtaagagcgggcttacgagcagcatgattaataccttcctcggtaatcgcgcgcttcgcgaggcgtcgcaggaggtcgcggcggaaatggcggcccagccttgcccgaccgaggtggcaaaaaaactgatcgccatgctgcaacacggctaaccgcggcagcgcaatgacaatatggcggctgaacccagcgtgtgtcgccatatctcatctttcaccgataaggaggcttaatgcccgcgactcattcccccatgcccgctcgtgcctggatagttcgccttgcccgcgtgtgttgggaacgtaaaacactgagcatcattgtcatcgtagcatcagtatcgaccattttactggctgcgctgacgccgctaataacgcgtcaggccgtcaatgacgcgatagcaggcgatacgacccacctgccgttacttgcctgcggcctgctgttaattgccctttttgattttatcgggaattacgtgcgccgcggctatgccggagaactctcgctgtgggttcagcatacgttacgtagccgtgcgttcgacagtattcaaaaactggacggcgcaggccaggacgccttgcgtaccgggcaggtcatttcgcgtaccaacagcgatcttcaacaggtacacaccttgctacaaatgtgcccggtgccgctggcggtactcacttactatgtggccggtatcgcggtgatgctatggatgtcgccatccatgacgcttatcgtgatttgcgtactggccgcccttgccattaccgccctgcgcgcccgtcgccgtgttttcgcgcaaacggggcttgcctcagaccggctggcgcacatgacggaacatatgcgcgaagtattggaacagatctcagtggtgaagtcctgcgtggcggagttgcgcgaaacgcgttggctcgatggtcagtcgcggcagatggtgcgggtacgcatcggcgccgctatctcgcaggcgatgccgggcgcaaccatgctggcgctaccggtgatagggcaaatcgtcctgctgtgctatggcggctggtcggtaatgaatgggcgcatcgatctgggaaccttcgttgcgttcgcgagttttctcgctatgctgaccggccctacccgcgtactggcatcgtttttggttatcgcacagcgcacacaggcgtcggtggagcgcgtcttcgcgcttatcgacacgcgttctcgcatggaagacggtactgagtcggttgaaggtcagattatcgggctggacgtggagaagatgagtttccactacgacaacggtaaccgtatcctcaatgagatctcgttttccattcacgccggtgaaaccgtggcagtggttggcgcctccggctccggaaaatcaacattgctgatgttgctggcgcgcttttacgatcccacctccggcggggtgtggctcaacaccactgcgggtcaacagaatattcgcgacctgaaactgacggcgcttcgtcgtcgcgttggcgtagtttttgaagacgcgtttctgtttgccggtacggtggcggaaaacatcgcctatgggcacccgcaagcgactcaggacgacattcgacgcgccgccgatgccgcaggcgccagcgggttcatcaatgcgctaccgcaggggttcaacacccgactggccgaacgcggaagcaacctctccggcggccaacgccagcgtattgcgctagcccgggcactgattaccgcgccggaactgctgattctcgatgacaccacctcggcggtcgatgccggtactgaagcggaaattaacacggctcttggtcgttatgccgataatgagcatatgctgctggtgattgcacgccgccgttcaacactgcagttagccgatcggatcgtcgtgctggataaaggccgcgtcgtggatatcggtacccaggcggagctggatgcaaggtgtccgacgtttcgctcgctgatgagcggcgagggggattttctcgcccttgccccggcagaacaacgtacgctatggccaacaacgcaggcggtaaaatccgacgacgcgcatgagcgccagacacccgccggaaaaggttttgtcgaccggatgacgcgcgttccagaacgcgccgtacagatggcgctggcaggccacgggcgtcaagtctcatcgctgctgacgccagtagcctggatgttcgtcatcgccgccctgcttatcgcgcttgattccgccgcaggcgttggcgtgctggtgcttttgcagcgcggtattgactcaggcgttgccgcaggggatatgtcgactattggcatatgcgccctgctcgcgctgtgcctggtggcgatcggttggtgctgctatgcgctgcaaacgatcttcgccgcccgcgcggcagagtcggtacagcatacggtacgcttacgcagcttcagccacctgctacgcctgagtcttccctggcacgagaagcacatcgactcgcgtcttactcgcatgaccgtcgacgttgattcactcgcccgatttctgcaaaacggtcttgccagcgcggccaccagcatcgtgacgatggtcgctatcgccgcggcaatgttctggcttgaccccattcttgcgttaacggcattaagcgccgtgcctgtagtgatgctggcgacgtggatttaccgccgtttgagctcgcctgcctacgcccaggcacggctggaaattggtaaggtgaacagtacgcttcaggaaaaggtctccggtatgcgggtagttcagtcacacggccaacaacagcaggaagccgccaggctacgggcgttatcagacaacttccgcgccacccgcgtgcgggcgcaaaaataccttgccgtttattttccgttcctgaccttctgcaccgaggctgcctatgccgccgtgcttttaatcggggcgagccgggtcgccggaggcgaaatgacgcccgggatactggcggcgttcttcctgctactgggacaattttatggcccggtacagcagttgtcaggcattgttgattcctggcagcaggcgaccgccagcggcaaacatatcaatgcgctattggcgactgaggaaacggagaatattgaaccgtcctccataacacctggcactggcgcgctacgtctggaggcattgacattcctctatcccgaaaaaacgcaacctgtgcttgataatctctcgctcattattccgccaggaacggtagtcgcggtggtcggacgtagcggcgctggcaaatcgacgctgatcaagctgctggccgggctctactctcccggtagcggacaaatccgtgtcggtgagcgcttaattgatgccgcgtcgcttagtgattatcgtcgccagacggggctggtcactcaggatgtcgcattatttagcggcgatattgccgaaaatatccgctatccgcggccagacagcagcgacacggaggtggagagcgcggcgcgacgggcgggactctttgaaactgtgcaacatctgccgctggggtttcgtactccggtcaataacggcggcacggatctgtccgcgggccagcgtcagttgattgccctcgcccgcgcccacctggcgcaggcgcatattctgctgctcgacgaggcgacagcgcgtatcgaccgtagcgccgaggagcgcttaatgacctcgctgaccagggtgacgcataccgagaaacgcatcgcgcttatcgtcgcgcaccggctgaccaccgctcgccgctgcgatgtgattgtcgtaatcgataaaggatgtatcgctgaatatggcagccatgagcagttgatagcggctcatggcctgtatgctcgtctgtggcggaacagcatcggccagacacgcgatacgcaaggagaggtcataggatagtttttatcgccacgatttacgcaaaagaaagcccgcaagcggctgttcatgtaacagccgctttagctattgatactgaccgaaatataaacgagatggaatacaaagaatgagactgagcccgcccgtcgctcctgtcgctatacagaccgctacgcgccttcgccgtcaactcgccgccggaagccaggttgacgcttctcacttctggcgagaagcaaactcgctcgcactgccgctggtgacagccattaacggcgcagacgatgaacgggaagtcaccttcctgtggcgtgccgcctctcctctgcggggggtttatgttcgcctgaaccgtgtcaccgataaagataacgtggcgaaaggtatgatgacgcaactgcccacaacggatatctggcatctgacgcttcgcttaccggcgtcctactgcggttcctatacgatggtcgaaataccaccggaaaccccgggcgagacggtgttgcagcttggaagccgtttcgcctcccttgtcgggaaggcggatccgctgaacagcgcgccgggaataaatgttcggggcaatgcgcaggaatccgttctggcgctggatcatgccccggcacaggaggagtggtcaggctgtcgcgcttacgccgggcagcttttcacctcagagcatcggctcgccggacaacgtcgccgtgtgcggctgtatcttcctgacgttcctgtcgtacaaccgctgggcttgctggtactcacggatggcgagatctggttcgaccatcttggggtaagcgccgccattgacgccgccatccgcagcggacgcatcgcgccggtggccgtactcggcattgataacatcaacgcgcgtgaacgcgtcgcaatactcggcggtcgccgcgagctggtgctcgacattgccgaacgcctgctgccaacccttcgcgccaaatacccggaacggcggtgggcggaccgtacacaaacggtgctggcagggcaaagccttggcggcgtgaccgcgctgatggcggcccgccacgcgccagagagcttcggcctggtgctgagccactccccctcaatgtggtggacgccggacaaccgcaaccgcccgaaccatttcagcgcagaagagcgctcatgggtcagcgaacatgtgttatccgcgccctcgccagccgtacgtacgcatctgtgcgtgggatcgctggaaggttcgacggtcccgcaggtcaaacagttgcatgaaaaattgcgcgccgccggcgtcgaaagccattacagcgtgtacaccggcggtcacgattatgcctggtggcgcggcgcgctgattgacggattacgtctactgccccgataaaacttcacctgccaaaaaggaataacatccgatgtatggtcgccagtaccacaacaagcgctatcgcatggcgctatttttagtgagtttttgttttagcgcgctgagttatgcgcagccggatatgcagccattagggccgaatatcgctgataaaggttcgggatattaccatttcagggtcaatgactttcaatctgccgatggcgcaagacattaccgggtatggaccgctatccccaataaagccgccccgccgtcgggttatcctgtcttatatatgctggacggcaacgcagtgatggacagactgccggagacgctgctcaaacagctggcagaccactcgccgccggtgattgtagcgattggctatcagactaacctgccgtttgatcttaacggcagagcttatgactatacgccggcgccgggaatcgatcgcgatgacagtgaaaataacccgcgttttcatcgtaaaaccggcggcgggccagcgttccgccagctactggagagacatatcgcgccgcaggtggaacaaggaataaccatcaactccgaacggcgcggggtatggggacattcttatggcggcctgttcgttttagactcctggctgtcgtcatccttctttcatatctattacagcgccagcccgtcactcagcagggataactttgtcctgttgaatcgccttacgacagtgaagccgtcgctgttctgccataaaaaactcatcataatggaaggttcagcgtcgaatggggatagcaggcaacgccagatggccgagctcctacaaaaagttcaggagaccgtgagaacgcttgagaacaacggcgttaacgcggccctgcagcattacccgggcctgggccacgggcccatgtttaacgcctcttttcgcagtgcattgctggatatcagtcgcgaaccggcaagccaaaaaccacgctgccattaacccgccgccagaatatgcccgccagcggcgggcataatccatcaaaacgaggccgtcacaccggcataataagcccgccccggttcgttataggtatttgccccttcggcggagcgatagatctgtttatcgaagatattgctgataccgacattaagacgcaggttcttattgatatcgtagttaacgttagcgccgaccagtgagtaagcccccagcgctttcccggacaatcctttggtctcttcactacgcgactccgcatgtgttcgcggtttttgcttgccgtataacgtccagttgacgttagcggagagcgcgctggtgatagtccagtcgaggaaggtattcaccgtatatttcgggattatcgataagggattgccggtatctttttgctcagaagcaatcatataagtcgcattggtattccagttcagacggtccggcatcagcggaacagccatgctggcttcaataccttcaatcagcgctttaccgccgttctgccactgcaatacataagcgccagatgcgcttctgccaataatctgatcacctgcgacaatcttattctgataatcgttacggaaatacgttacgcttgcgtgataatcgtctacggtaaattccagcccaatctctttattgatactaatttcaggatcgaggttcttattaccaaccaggtaacagccgcccgacgtaatatcttttggacaaccgttgcctttcgaatagagtaaatacccctcactggtttgatacaagttcggagccttaaaggcacgggcaataccggctttcaccttgacgtattcacctaactcctgggaaaggttaagactgggactaaaattactcccggattcgctcaaatagtcaaaacgcagacccggaataatattggtaccggccataggttcgatattatcttcaacgtacagcgcactgatttccgatttatttttgctgctacggttagccgccgaaccgggaatcccggcgatattgctatccttaaccgtcagactggtagaggaaggatcgttcagctcatcgcggttccactccgcgccgacggtgagcgtttgctcaaatagccatatcaccgggacattcacctcgccgctggtgcgatacgaggtcaggcggttagtggtgaacgtctggtcgttggtaatacgcccctcgccgccgccggagagcccctcattcatgcgggtgttatcggttttttcatagtagaaccccaggcggctttgcccccagtcccagatgccgttatgagttagaccgtaattctgccggtacaggcgattggtctcccgcccggactgcgccagacttttggtaaccgcgtttgaagtactgttttgcgtatcgccagcataaatattcccctgccgactatatcccgcttcaaaatcaaggatttgctgcggggtcattttccatgagaagacgctattaatatctttattggtgaccccctcccgtccggcggcatttttggtaccggcggaggagttaatatcccagctatcggcatcggttctgttgagattaccgtacaggcgcatcgtcaacgtatcaccagccaacggaccgctaaggctaaagttaccccgccgggtgtcaccttctttgctgctttccggctggttggtatagagcgacagcgagccgtgccagtcgttagtcggacgtttggtgatgatattcaccaccccgccagcggcaccggagccatagcgcgcggcggcgggcccacggatcacttcaatacgttctaccatctccggcggtacccagttcgtatcgccacgggtgtcgcgttctccgcgccagctatagcgaaccgaatttcgcgacgtcaccggcacgccgtcaatcagcactaaggtattttccggccccataccacgaatatcaatttgtcggttatttccgcgcgtccccgaggcgctattgccggtaagattaaccccaggcatcttacgaataatatcggcaagatcgttaacgggaggattcttttgaatatcgtcacgagtaataatcgaaacgcccggctgttgctttaatacttgctcggcggtggattcaaccaccatcgtttcgccgttgtcgtcagtagattctgctgctgataatggactattaacccctgtagaaaccacggttattaaccagatgaacttcttaactctcatacccattccctaaataatgtctaaagtagcgctgttgccctcaagctcacatccttgccaggttacgtctatatagtaattattatcatatgctaatgataataattatcattcaattaaggaaaaggcaatctttcgaccacaaaaatctggtaataaaaaaacggaaacgggattttgcaatatgactctctgtccgggctccgctttgccagtaaatccgggaaggggggcagaatgcgcctactgaacggaggttttacaaaacagaaatagataaaataaaactatttttcagatcgttaatcacaagaaacacccaggtaagatggtatagcacggttcagggttcaccgccgcttccctgccgacggcgaaccattcttacagtttgccagcgactttccgtctgggtaatggcgggatcggatacgattgtagccattcgatatttgatgatgaaagtgatgttggcaccaacatacaaagcgcctggtaatatttatcaggcgctttgcagacagaaaaccatcaaacatcagtttctcgttctccaggaactactggaaaatatggcaacccacagttattgggttttactgtcgggtcttgccagggattttgtgttacccccaggtcttttaaaagaccgcgtaacagcactaaatccctgggtgtcattttttgctttggttcaccctctttaggtggacgaatatcctcctgactagtacatgtaacacaataaccttttaactctatccacttaggcttagggggggccttaggatcgggaggcgtcgagctgacaacgcacgaacaggcacttatacatccaggcatagcgttttccttttcaaacaattcgctttagttggaagttctacttgagaaaataggaatggttattcagatatttttaccgtcgcatactcctgtaataataaaagatactgtaaataatttactctcagctactattcagtagcagattgttattcttacattgcttttatttcagatttacgtcaaaaagggctaaatattttcactataaaattcgttaaagagtgtttgtgtgcttgtagacattgtggcgtcttcagtacgcaaatcggttagtgtacaatctttaaaacaggtattgtttaaattagcctcagccaaatcagccccgtccaggttcgtagaaatgaaactcgcctttcgcaggtttgcccgggttaagacagcgccttccataattgcagccattatagtagcaccctgtaatgtcgcaccgctcatatcagcacgtataagggttgcgcctgaaagattagtgtgatccatatttgcaccggagcaattacattctatcatgctacagcctaacagactcgcgtgttgtaaattggcgccagtaagattagcgtgatcgagggtagcgccacacataatgctatcttccagacaggcgttcttgaaattactgtcgcctagtgatgttcccgatagatttgcgcccttaaaatttgcaccttcacaatccgccataaacagcactgccccctctaaatttgcgccgcttaagtctgcgtcacataaattttctgacgtcagatttgctccggtaaggacagcgcctttaagattcatgcctccctgggcagttaatattacagaatcctgagggagagaaaattcgcatctgaatagtaaagctcggcatattttttcaaaagaggcaagcggaatttctcttgtctcagaatggtcgcctttactgactcgtacaataacttgtccagcttcgttattctcaccaggaagattaaattcgacacgacacccatccatatcatccaggatgatgttttctggcaacggagcacctctgtcaggcattgtacttttcaatgtctcagccatagtctctatcaattcctgatattgtgtttcatttctccgacgtatcccaccacaggtaaaaaagttaatgatatattccagaatggttttgggcgaggtagcttgccgcatagcagcagaagtccccgcgccaaaagcagatttagccataccagccagactatcgagtgaacgctccatatattttctcccagagacagcaacacagtgcatgataaaatttatcatatagatttgcatttagagataaggtgaataccccctttacgtctggttacataataacgtatcacgacgcgttgctgtctggcttacacaatagcagccaaataaatatattggcttatactcgtcatacttcaagttgcatgtgctgcggccgcgttccctcaccccagtcacttactttagtaagctcctggggattcgctcgcttgccgccttcctgcaactcgaattatttagagtatataacatcatttaaaataataaacacggcattcgttttaatactacgttctggactcatcccactcattagcagaaaacctattaaaaagcgtgttcaggcattttattaccgccattgataaactgtttaacaacatcgtctgtacagaccttcttcgttgcctttacgtttaactcaatcaggctaccgtctcggttataagtctatcgagtagtagagccgtagtatgacgatgcagcaaagtgatatggaaagatataatccattattaatgttaaaagaagtcatggcgcagacgccttatcgccataaacgctggggagagcgtaagtttcgctataaatttttattacgttgccttattaaccccgtaacgacaattaaatacttcaatgaattatgccatctgtctcagcccagaacgctgattattcatcgtccactgttgccggcaaaaatccagcggccctatttgtataccgggcttagcatacgttgccgggcaaaagctattctggaacactaccagttcgttcagtcctttccggaaagtaaaattaaaaagatcctcctgtccgaggaacaaatcttactcgctcacctggaaggaaaaaacggtgctctggtagatatctactgcggtccctgtggctatgacagagaaggtgaactgacattaacgctgtgcttcaatgatacgccgttggcacgtttatcattttcctttatccgccatgaagggaagcaaatagcgctggttgccgggttacaagggcccagtaaacatatcggcccacaagtcatacgtaacgccaccaaagattgttacggtctctttcctaaacggatgctgtatgaagcatttgcgacattgatgcaggcctgtaatgtcgacgagatttatgcggtcagtgaaaacaaccatgtttatcgtcaactccggtacttattccagaagaaaaaacttttgtggccagctatagtgaattctgggagtcgctaaacggcgttaagaaaggtgccttatatcatctgccatcacaggtgatgcgtaaagcgcctgaaagtatccccagcaaaaaacgcgcagagtatcggaaacgctatcatattctggatacaataatacaagaggtcaacagcctctcccggtagaactatttcatacgcggatgtgcagatcctgctaccgttcagcggatcttttgaaatctgtatcgctactggatggttaaatacagaatggcttgcgagtgaatagcgcggcattaaaccgtcgctttcactcatgttatgatcaacatcttaatcttattcccttcaccataacgtcatcgattagcatgttaaccattaaatacaagctaaacatttgtcacatttttatttggttaagcaaaaaaataatacaaaatagcattttcagtaagctaagtcaggagttttggtgaaaatacaagaagttaagcgtatattaacccgctggcaaccgtcttccttttccctataccgggaggtgtttacgcaatacggcggtagtatcaatatgcacccagatattgtggattatttcatgaagcgctataactggcattttaaattcttccactataaagaagatgataagattaaaggcgcctactttatctgtaatgatcagaatattggtatcctgacgcgcagaaccttcccgctatcttcagatgagatacttattccgatggcgccagatttacgctgcttcttgcccgatcgtactaaccgactttcggcgttgcatcagccacaaatacgcaatgccatatggaaactcgccagaaagaaacaaaattgtctggtcaaagaaacgttctcttctaagtttgaaaaaacacgccgtaatgaatatcagcggtttcttaaaaaaggcggaagtgtaaaaagcgttgctgattgttcttctgatgaactgactcatatttttatcgagttatttcggtctcgtttcggcaatacttcatcctgctatcccgctgataaccttgccaacttttttagtcaactgcatcaccttctgtttgggcatattctttatattgaagggataccctgtgcatttgatattgtactgaaatctgaaagccagatgaacatctactttgacgtatctaatggtgcaattaaaaatgagtgcaggccactcagtcccggcagcatactaatgtggctaaatattagccgtgccagacattactgccaggaaagacaaaaaaaattgcttttttccatcggcatactaaagcctgaatgggaatataagcgcatgtggtcgaccccctattttaccggaaaatcgatttgctaaaaagaaagcctggacgtaaatatgttttttacgtccagatttttcataaatcctgatgaactgataaaaaacgaaaatttaatcagaatttaaaaaataagttaaccaccatataatcataatgacaattactcgaaattcacttacactatactcggttttatggaattgattaacacggtatgttacagataacgtgctaaaaagcgtgcagcggttatacattttcatatgtgtgtgtcattaacctggcgtcaggaacagatgatgatgacaactacccttttatctcttctggcctggcataccgtcagtagattaaaggagtagccttgctttatggcattacaaaaatgcgggtggggtctatgctcaatgtatacgttatttgtaacaacgctcttgtgcataaacaatacgttattgccaacagcactgaacgggtacagtggttcttgctgacaacaggcttaaagatcgccttaacacgggatacctgataactggattatattatgacacatgcagactggctgattcttgggtatacaactgttattattatttttggtattgtatgttatatcggattgcttaaattgataacgaaaggcaagcatgaaaaataacgcacttaccgggaagaatatactctcaggagataaaatgcttcggcaatgatatgacaccactgccgaaatgctatttttaaagaaatcaatcaggtattgagggtgattttatcatagccgcgccagcgataattcaacaccgagagcagccagaatagcacaaaagcacccactacccagaagcccacattccccatatgatcgttaagcgtgctgacggtctgccaaaatgttccgcttaactgtaacgcatcatcaatcaaccccagcgcctcaagcccgccaatcgccagcgcgacaatgacggatgcggcggtaatggtcatattataataaagcttacgtaatggatgcgagaaagcccaaccgtaagcgccgaccatgacaaagttatccagggaatctaccagcgccatcccggcggtaaacagcacaggaaaaatcatcattgaccagagagatagcccctggttagctgctgaagcggaaatgcccagcaacccaacctcggttgcggtatcaaatcccagaccaaacagaaaaccgacaaaatacatatgccaactggaagtgaccaaacgaaacgtacgctgaaatatacgcgtcatcagcccgccaggtatcgcctcgtcatgcgccctcactgactcgccgcgggtaaccgagcgaaattgccgccagacgttgaacaaaataaacaggttaagcagggccatcgccagcagaaaaaaagcggaaacagccgtaccaatcaacgaaccatattgatgcaaaacatcaatacgatcgcgaaatgccatcgacgtcacaacaatcgccagacatgccagaacgacaatggtcgaatgacccaatgaaaaaaacgcccccacgcctaaaggcgttttaccctgctgcatcagtttacgggtgacggtatcgatggctgcgatatgatcggcatcaaccgcatgacgcagcccaaagctatacgccagtatggctgcgcttagcatgacggcatggtgatgaaaaacacagaacgcccaaatccaggccaggatgttaaccccgacaagaaagacggttaatgctattccccgtcgtttagtatgattattcatgcccctgcacccactatatttttaattaacgctacggtttgtagggggaatgtatgatcatttgattaaaacgtcacacctcaagatgcgactttttgtaaacgtgctttaccgctgacacatttgtccgcattactgcggaacaaggcttaaaaagcgtatccgaacgtataaccctcccaacgcttcgctacgggaaaaatggggatgagtacggtgcaggcgtgcgatatcattgaccaaagccagaccaatgcccgccccggccacatttcctacgttatcgagccggtggaacggctgtagcgccagatggatgtgttcatcatcgatgccgggaccgctatcttcgacaaccagcgtcacggcatcgccatcccgttcaagccgcgcggtgacgatgccttgctcaggcgtgtatttcagcgcattatccagcaagtttccgcatagctcgctaagcagtacctcatccccctcgatccacatcgcttcctgttcgccttcgtagcccaggtcgatatgtttactgcgcgcctgcgccagacgggtaaaacagccgctctgtacgatatcgtacagattcaccggggaaaaacgccgctcgccctgctctttatgctttaccgcagaaagttgcaacaatctttccgtgagctgaatggtgctatccagcgttacgctcatcgcctgcagactttcgtaccagtgatgagggtgctggctggctaacgccaccgccgcctgcgtttttaacaccgccagcggcgtttttaactggtgagaagcatcggcgctaaagcgttcctgccgggagaggatgccgcggagcctgtcaatgtagcgattaaacgccacgattaacaagcgtgtttccgaccacggcagcagttccggcagcggcgttaacagacccggttcgcggcgtaccattaatgacgaaagttgacgcatagggcgcaggatccggcgtaataaccagccaaccagcaccagggtcagcaacaccagcagaccctgtgagatccaggaagagaacagcagttggcccgccagataacgacgggactgcagcgtctctgcgacataaatctccgccatgccgataatgccgccttcgttgaccggctgtagcaaacgcgccacgcggatcgcctcgccgcgatactcggtatgatagaaccacgccagcgccggataaagccgggtacggggcgtagcgggcggcatgacgggcagatcgtcataaccggaaatgacctttccggaagggtcgacgactttgtaatagagtcgatcattcatattaagctcgaagctatccagcaccacccagggcacgttaacttccagatggttattgcgcaccaccagccgttccgataccgttcgcgccgaggagagcaacgtacgatcataagcctgagtggcggcctgtagcgcattgacataactgttaaacgccgacagcccccatagcagaatcagcggcaaccccaggaacagtaagagttgcaggtacaacgattgcggcttaacccacttcatcgccgcgctccagcacataacccaggccgcgcagcgtcgtaattcgtacatcgcttccctgaagttttttacgcagtcgatgaatataaagttcaatgctttcagggcttacctcatcgttcaggctgaacacctgttcaaaaagctgctgacgcgaaactggtcgcgttcgtcggtacatcaatacggttaagagcgcctgctcacgcggcgtcagcgctaacggctgcccctgtaacagaaaatacccttcatcatgaaagatcaattcccccagttgctgaacttcatgaacctgcccagcgctgcgtcggagcaaggcccgtaaacgggcatccagctcttccagttcaaagggtttcggcagatagtcatccgcgccgacgttgagaccttttacgcgatccgccaccgcgcttcgcgccgtgagcagcaaaacgggcaaggtctgaccgcgtttacgcagccgttgcaccacctccagtccatccattcccggcatattgatatccagcaccgccagcgcgtacatttcactgtgcagaagatggtcagccgccaggccgtcaaatacgcagtccacggcaaagccgttttgcaccagcgctttctccagccagtgagccagctcacggttatcttctgccaataagagacgcatatcacatcctgtaaagtttctgccgcattgaaagggaattgaaaggttattgttttaacaatcacgcaaccgaactgctacatgtcggctcacataatcacaaaaatcttcttccgaacctgaaaaatccggacgtccggcgtgaggataaaaaatgaaaaaacaattacttcgtacccttactgcaagcattttattaatgagtacctctgttctggcgcaggaggcgccgtcgcgaacggaatgtatcgcgccagccaaacctggcggcggtttcgacctcacctgtaagctgattcaggtgagtttgctggagactggcgctatcgagaaacccatgcgggtaacgtatatgcccggcggcgtcggcgctgtggcctataacgcgatagtcgcccaacgccctggcgaacccgggactgtggtcgccttttccggcggttcgctgctcaacctgtcgcaggggaaatttggtcgctacggcgtggatgatgtgcgctggctggcaagcgtgggcactgattacggcatgatcgccgtgcgtgcggattctccgtggaaaacgctgaaagatctgatgacggcgatggaaaaagatcccaacagcgtggtcattggcgctggcgcctctattggcagccaggactggatgaagtcggcattgctggcgcaaaaggcgaacgtcgacccgcacaagatgcgctacgttgcctttgagggcggcggcgagccggtgacggcattaatgggcaaccatgttcaggttgtctccggcgatctcagtgaaatggtgccttatctgggcggcgacaaaatccgcgtgcttgccgtcttttcagaaaatcgtctgccgggccagcttgccaatatccctaccgctaaagaacagggctacgacctggtgtggccgattattcgcggcttctacgtcgggcccaaagtcagcgatgccgattaccagtggtgggtggataccttcaagaagctccagcaaaccgacgagtttaaaaagcagcgcgatctgcgcggcctgtttgagttcgacatgaccggccagcagctcgatgactacgtgaaaaaacaggttactgattaccgtgaacaggcgaaagccttcggactcgcgaaataatcgcggaggcaatgatgagcgatcgtatctttgcgggtatctggctgttgctctgtatcgccgggctattcatcgcctggcagatccaaagcgaatacagctatgaacccgtcggcccccgcccttttccgctggggattatcggcctgatggcgctctgcgcgctggcgctgttattgcgccatcccgacacggtgagctggccgcgccgccatgttctgcaaaagctaattaccatgatcatcatcctgttgatgtatgcctggggattcgaatggctgggttttcccatcgccaccgcgcttctcaccatggttatcgggatgctgttcggcgccacgattccggcggcgggtatctccggcgcggtattgggcattctgctgtggtatgcctttgaccggctgcttgatgtcaccttacctctcggcgcctggctgagttaacggagcaacgatggatacctggatatatctttctcagggctttgcggtggcgatgacgccggaaaacctggttatcgcgttgattggctgcttcgtgggcacgatcgtcggtctgctgccgggtctgggaccgatcaacggcgtggcaatcttactgccgctggcctttgcgttgcatctgcctgcggagtcggcgctaattctgctggcgacggtgtacattggctgtgagtatggcggcaggatctcctccatattgctcaacgtccccggcgatgcggcggcgatcatgacggcgctggacggttacccgatggcgcagcaagggaaaggcggcgtagcgctgtcgatttccgcagtcagctcatttttcggttcattaatcgctatcggcggcatcattctgttcgcccctttactggcgcaatggtcgctggcctttgggccggcggaatatttcgccttaatggtttttgccatcgcctgtcttggcagcatgatggcgcaaaacccgcttaaatcatttctggcagcgctgatcggtcttggccttgcgaccgtcggcgtggacgccaacaccggggtttatcgctttacctttgacagcgttcatctttccgacggcgtacagtttatcgtcgtggtgatcggcctgttctcggtatcagaaatacttttaatgctggaacataccagcagcgggcaaacaatggtccgcaaaacgggtcgaatgttgttcaacctgaaagaaggcgcgcagtgtatcggcaccaccctgcgttcttcggtaatcggcttttttgtcggcgtattgcccggcgccggggcgaccattgccagcgccattacctatatgaccgagaaaaaactcagcggcaacagcgatagcttcggcaaaggggatattcgcggcgtcgcggcgccggaggcggcaaacaacgcctctgcctgcggctccttcatcccgatgctgacgctgggcgttcccggttccggcactacggcagtgatgatgggggcgctgacgctgtacaacatcacgccaggcccggcgatgttcaccgaacagccggatatcgtctggggactcatcgctgcgctgctgattgcgaacgtgatgctgctgatcatgaatatcccgttgatcggtctgttcacccgtatgctcaccattccgctgtggttcctagtacccgccatcgctgccgtatcggcggtaggggtgtatgcggtacacagcaccaccttcgatctggtgctgatggtcgcgctcggcgtgttagggtacattttacgtaaaatgcacttccccatgtcaccgctgatcctggggttcgtactgggggaaatgctggagcagaacctgcgtcgcgcactctccatcagtaacggcaatatggcgattttgtggcaaagcggcgttgccaaagccctgctgatcatggcgatcatggtcattgtcgtaccgccagtgttacgtctgctccgtaaacacagccgtaaaccgcaggttgacgccggttaattgactgctgaaatacgttgtacttgtccggcctacgcgctcatgtgtcaggccgggcaaccccgccagcatcactttccccataacgctctcattttacaccccttcttgccgttgtcaggctcgtggcgccgttaacctcaccctttgcattgttaaatatttgttgtttttgatcacaataattaaacaaaagcggttatttcatacgcgttcctggaaaatgtcgatatttttaatttatggctacgaaatgagcatcgccatgtctccctgaccatctaccgagaggaatgattctgatgaatgcactgactgccgtaaaagcgaacacagatgatttagcccaacgccatactggtttcacccttgccccttcggcgcagtcgccgcgcctgctggcgttaacgtttacggcggataccacaaaacaatttcttcatcaggttgcgcagtggccggtgcaggcgctggaatacaaatctttcttacgttttaaaatcggcaagatcctcgacgatctgtgcggcaatcagctacaaccgctgttgatcaaaacgctcctcaaccgtgcacaaggcgcgctgttgatcagcgccgaagggatcgatgatgtcgcacaggcagaagagatggtcaaactggcgacggcggtggcgcatcttattggtcgctccaactacgatgcgatgagcggccagtactacgcgcgtttcgtggtcaaaaacgtcgacaactccgacagttatctgcgccagccccaccgcgtaatggaactgcacaatgacggtacctatgttgaggaggtgaccgactacgtgctgatgatgaaaatcgacgaacagaatatggaaggcggtaattcgctgttgctgcaccttgatgactgggaacatctggagtcgttttttacccatccgctggcgcgtcgcgtcatgcgctgggcggcgccgccaagcaaaaatgttagccatgacgtctggcacccggtgtttgatgtcgaccaacaaggccgcccggtcatgcgttatatcgaccagttcgtccagccaaaagactttgaagaaggcgtctggctcagcgagctttcagacgcgctggaaaccagtcaaaacatcctctccgtaccggtaccggtcggcaaattcctgttgattaacaatctgttctggctacatggacgcgatcgttttacgccgcatcctgacttgcgtcgcgaactgatgcgccagcgcggttacttcgcctacgccgccagccattatcaaactcaccaataagcgccacggcgaaggaattacgcggatgtatgattttgtgattatcggcggcggcattatcggcatgtcgaccgccatgcaacttattgatgtctacccggatgcgcgcatcgcgttgctggaaaaagagtccgcgccagcctgccaccagaccgggcataacagcggcgtgatccatgccggggtgtactacacgtccggcagcctcaaagcgcagttttgtctggcaggcaatcaggcgaccaaaaccttttgcgatcaaaacaacatccgctacgacacctgcggcaaaatgttggtcgccacctcggagctggaaatggcgcggatgcgcgcgctatgggagcggacggcggccaacggcttagagcgcgagtggttaagcgcggcggagctgcgtgaacgcgaacccaatatcattggcctgggcgggatttttgtcccttccagcgggattgtcagctatcgcgatgtcgcgacggccatggcgaaccgctttcaggccaaaggcggcgagatcatctaccatgccgaggtcagcgcgctaacagaacatgccgctggcgttgtcattcgcacctcgcaaggtcgggaaatagaaaccgctacgcttatcggctgtgcaggactgatggcggatcggctggtcaaaatgctgggcgtggagcccggttttattatctgccctttccgcggcgagtactttcgtctggccccgcgacacaaccggatcgttaaccatttgatctacccgatccccgatccggcaatgccgtttctcggcgtccatcttacccgcatgatcgacggcagcgttacggtcgggccgaatgcggtgctggcgcttaaacgcgaaggctaccgtaagcgcgacgtttccttcaccgacaccctggagattttccgctccgccggcattcgccgcgtactgcaaaaccatctgctttccggactgggcgagatgaaaaactcgctgtgcaaaagcggctatttgcggcgagtacaaaagtattgccccagcctgaccgtcaacgatctccagccctggccggcaggcgtgcgggcgcaggcggtttcaccggacggcaaactgattgatgattttctgtttgtcacaacgccgcgttccattcacacctgtaacgccccctccccggcggcgacatccgcgatacctatcggcgcgcatatcgtcagcaaagttcaggcgctacgcgcaagccagagcaaccccggacgtacgctgcgtgcggcacgcagcgtggacgcattacacgccgcatttacccgttaacccttcagacaggaagcaattatgcaacttaacgactctaccctgttccgccagcaggcctttatcgatggcgactggcgcgacgcgcgcggcggcgatgtcatccccgtgagcaaccccgccaacgggaaaccgcttggcaatgtgcccaaaatgggggcggaagagacgcgcgacgccatcaacgccgccaatcgcgccctgcccgcctggcgcgcgctcaccgccaaagagcgagccaatatcctgcgtcgctggttcaatctgatgatggaacatcaggacgatttggcgcgtctgatgacgctggaacagggtaaaccgctggcggaagcgaaaggcgaaattagctacgccgcctcgtttattgaatggttcgccgaagaggggaagcgtatctatggcgacacgattccaggccatcaggccgataaacggctgctggtgattaaacagcccatcggcgtcaccgccgcgattaccccgtggaactttccctcggcaatgatcacccgtaaagccggccccgcgctggccgcaggctgcacaatggtactcaaacccgccagccagacgccgttttccgcgctggcgctggcggaactggcccagcgcgccggaattcccgcaggcgtatttaacgtcgttaccggttcggcaggcgatatcggcggcgagctgaccagcaacccgctggtacgcaaactgtcgtttaccggctcgacggagattggccgccagctaatggaacaatgcgccaaagacattaaaaaagtgtcgctggaattgggcggcaatgcgccgtttatcgtctttgacgatgccgatctggataaagccgtcgaaggcgcgctggcttcgaagtttcgcaacgccgggcagacctgtgtctgcgccaatagattgtatgttcaggacggcgtttacgatcgttttgcggaaaaactcaaccaggcggtaaataagctcgcggtcggtgacggcctgcaagccgacgtcgctatcgggccgctgattgatgaaaaagccgtggcgaaagtccaggaacatatcgccgatgcgctggaaaaaggcgcccgcgtcattacgggcggtgaagcgcacaaattgggcggcaacttctttcaaccgaccattctggcggatgttcctgataacgcgaaagtcgccaaagaagagacattcgggccgctcgcgcctctgttccgcttcagcgacgaggcggacgtcatcaggcaggctaacgataccgagttcggcctggcagcctatttttatgcacgcgatttaagccgcgttttccgcgtcggcgaagcgctggaatacggcatcgtcggtattaataccggcattatctccaacgaagtcgcgcctttcggcggcattaaggcctccggattaggccgagaaggttccaaatacggcatcgaagattatttagaaatcaaatatatgtgcatcggcctttaacaggagagtcgctaatgaataccaataacgctttaatgcagcgccgtcataacgccgttcctcgcggcgtggggcagattcacccgattttcgccgagcgggcggaaaattgtcgggtgtgggatgtcgaaggccgtgagtatctcgatttcgcgggcggcattgccgtcctgaacaccggtcatttacatccgggcattgtttcagcggtcgaagcgcagttgaagaaattgtcccatacctgttttcaggtgctggcctatgaaccgtatctggcgttgtgcgaacgcatgaaccagaaggtaccgggcgatttcgccaaaaaaacgttgctggtcacgaccggttcagaagcggttgaaaacgcggtgaaaatcgcccgcgcggcgacaaaacgcagcggcgctatcgcgtttagcggcgcttaccacggtcgtacccactacacgctctctctgaccgggaaagtacacccgtactctgctggtatgggattgatgccaggccatgtctaccgcgcgctttatccttgcccgctacacaacatcagcgacgacgacgcgatcgccagcattgaacgcatctttaaaaatgatgccgcgccggaagatatcgccgccattattattgagccggtacagggcgaaggcggattttacgccgcctctcccgcgtttatgcagcgactgcgcgcgctatgcgaccaacacggcattatgttgattgccgacgaagtgcaaagcggcgcgggccggaccggtacgctgttcgccatggaacagatgggcgttgcggcagatattaccacgtttgcgaaatcgatcgccggcggctttccgctggcaggcgttaccggccgggcagacgtgatggacgctatcgcgccgggcgggctgggcggcacctatgccggaaacccgattgcctgcgccgccgcgctggcggtactggacattttcgagcaggaaaatctactgcaaaaggcgaatacgcttggcaaaacgctgcgcgatggcctgatggagatagcggaaacgcaccgtgagattggcgacgtgcgcggactgggcgccatgatcgccattgagttgttcgaaaatggcgaccccggcaaaccgaacgcggctctgaccgccgacattgtgacccgcgcccgcgagaaagggttaattctgctctcctgcggtccttactacaacatcttgcgcatcctcgttccactcactattgaggcctcgcagattcggcaaggcctggagattatcgcccagtgctttgatgaggcgaaacaagcgtaatgtccaataagcagcgtcgggtggcgacgtaactgtcttatccggcctacaaaaaccgtttcgattgtaggccgaataagccaggcgccatccggtaaacgagcgcaataacaataaagaggttttaggatggggcaattgtcagaatcacatgcattagggggcgggctgaaatcacgccacgtcaccatgttatcgatcgccggcgtcatcggcgccagcctgtttgtcggttccagcgtggcgattgcggaggccggccctgcggtactgctggcctatctgttcgcaggacttttagtcgtcatgattatgcgaatgctggctgaaatggccgtcgccacaccggataccggatctttttccacctatgcggataaagcgatcggcccctgggccgggtataccatcggctggttatactggtggttttgggtgctggttattccgctggaggccaatattgccgccattattctgaattcatggataccgggtattccggtatggctattttcattagtgattacgcttgccttaaccggaagcaatttattgagcgtcaaaaattacggcgagttcgaattctggctggcgctatgtaaagtaattgccattctggcgtttatcgcgctgggcgcgacggcgattagcggtttttatccgtatgctgaggtaagcggtatctcccggctctgggatcacggcggttttatgcctaacggcttcggcgcggtgttaagcgccatgttgatcaccatgttctcttttatgggcgcggaaatcgttactattgctgccgcggaatccgatacgccggataaacatatcgtacgcgccaccaattctgttatctggcgaatttccatcttttacctgtgttccatttttgtggtggtggcgctgatcccgtggaatatgccgggtctgaaaagcgtaggttcgtaccgttcggtactggagctgcttcatattccgcacgcaaaattcattatggactgcgtgattttattgtcggtgaccagttgtctgaactccgcattatataccgcctcccggatgctctattcccttagccgccgcggcgatgctcctgcgataatgggaaaaactaaccgtagcaaaacgccctgggtagcggttctcctctctaccggcgcggcctttttaaccgttatcgtcaattattacgccccggcaaaagtgtttaaatttcttatcgacagttccggcgccatcgcgctgctggtctatctggtgattgcgatttcgcaattgcgaatgcgtaaaattctgctggcgcagggcggagaaattaagctgaaaatgtggctttatccgtggctcacctggctggttatcggctttatctgctttgtcctggtggtgatgctatttcgaccggcacagcaactagaagtcatttcaacggggctgttagggctgggcataataggtactgtccccattatgtctcgctggaaaaaactgataaggtggcaaaaagcccccctgcaaaacctacgttagttattcccggcgtcagccgggaagcttctcaggagtaaaagatgaccgccctttcccaaccgacggccatagatggctatcgctggcttaaaaatgacattattcgcggcacttatcagccggatgagaaactgcggatgagtttattaaccgcccgctatgcgctcggcgtagggccgctgcgtgaggcgctgtcgcaactggtggcggaacggctggtcaccgtggtgaatcaaaaaggctatcgcgtggcatccatgtcagaggcggaactcctcgatatttttgacgcgcgcgccaatatggaagcgatgctggtacgcctggcgattgaacgcggcgatgatgcgtgggaggcggagatcctggcgcgagcgcatatgctcagcaaactggaagccagcgatgccagtgaacatatgctcgatgaatgggatcagcgccaccaggcgttccattccgccattgtcgccgggtgcggctcccactatctgctacagatgcgcgaacgcttatttgacctggcggcccgctaccgctttatttggttacgtgaaaccgttctgtccgtcgagatgctggaagataaacatatccagcatcacacgctaaccgaagcgatactggcgcgcgaggcggcacgcgccagcgaattaatgcgtcagcatttgctgacgccgattcccattattcgccaggcgatggcagggaaaatgtagcctggcgcgacctgatagccattattcttcaggaatacgcaacacttgtcccggatatattttttccgggcttttcagcatcggtttatttgcctcgaaaattttattatacagattggcgttaccatacacttgctttgaaatagcgctcagggtgtcgcctgattttacggtataaaactgactttcagccgccggcgtcgtggttttaacctgatcgtcaacgctgctaatcccggcgatattccccacggcaaccagaattttttcttttgcctcctgactcagcccatcacccgtcactgtcgcttttccatcagctatttgcacattcactttgtcagcgtcgggtattcccgttttatttaaatgttcctggacttttttcgcctgatcgtccttatcatgattagcggttaccgcgtcccagagtttttcacctgcatcttttacaaaattgaaaagtcccatattcacctcgcttgtcaaaaatacacacaaagaaaagtgtagcagagggaatgaggttatcctgataagcggcgcttatgcgccgccggtggccggtaattaatgacgcatctgaacccaaaatgcgtggataagccccggaatatatccgagtaatgtcagcaggatattaaggataaatgcccaaccgaacccttttcctaaaagtacgccgagcggaggcaaaataatcgtaaatacaattctccagaaacccatatacactccatacaagcaaaattagtcattgtttaaaaagagattttatctctaagcatagtcagtttacctgagcctgccagtcgcgcgccgcgcttttaccctcctttacgctctttacgctggcattaggttgatgtttattttagaattaactaaatttagaaaatacttaaataactatgacagagcttgaacaacttcaggccagcgcagaacaggcggcggccctgctcaaagcgatgagccacccaaaaagattactgattttatgtatgctttgcggttcgccaaaaaccagcgcaggcgaactggcgcgcattaccgggctaagcccctccgcgacgtcgcaacatctggcgcgaatgcgggaagaagggctgattgatagtcaacgcgatgcccagcgcattcactatttcattaaaaatgaggcggttaatacgattatcgccacgttaaagaatctctattgtccataaggaggcacgatgtccattgggatagtttccccccgtgaggcgcaagcgctgatagcgcaaggcgcgaaactgattgatgtgcgcgacgccgatgaatatctgcgcgagcatattccacatgcgcaactggcgccgctctcccggcttgaacagggcgatttgcccgccaacctgcgagcggaacagattatttttcactgtcagtcaggtaaacgaaccagcagcaatgcagcaaaactacaggccattgccgcccctgctcaggtcagtctactggaaggcggtatcgacggatggaaagcggcaggattgcccgtcacagaagacaaatcgcaaccgttgccgctgatgcgtcaggtgcaaatcgccgccggcgggttggcgttgcttggggttattatgggctatacggtccacggcggctttttcctcattagcggttttgtcggggccgggttaatgctggcaggcatgaccggcttctgcggaatggcgcgactactggaaaaaatgccctggaatacccgtactcattaagcggtaccttcaccacgcgtcggtaagtgtgtagtagactgaaggcgggtttataccattgttcaacaggagggcgtgatgttcacaccaggcgatatcgtacagccccgaatgggtgggccgaaactgaaagtgattgaagtcaacgaggatcatattgtcgcggtacaggtcggtaatgaaccgggcgaaaaattgatcctcaaagcggcagatgtcaccccctattgcgaagagggcgattttggcgtgtgctgatttatcaaaatgagcatggcgcaacgttccctgagtcccggttaatagagacaggaaacgaagcgccatctgttaaaagctatccgtgattagattaagaaatcatccagagatttccccgccgccagcgcctgggcaatcggtttaggcgtacgaccttgtccggtccaggttttttcttcgccattgaaatcagtaaaacgatattttgccggacgcggctggcgctttttagcagaacgcggcattgctgaatccatggcaaataactcttccgggttaataccgtctgctttcatcagctccagaaaggcattaattttctcctgcttctcggcaagctggcgttgctgcaattcttcttcttcgcgtctttctttagtgacaaccctgaatttttcgagcatttcttcaagaacgtcaatggagaattcgcgagccatagcgcgcagcgtgcggatattatttaagttctgtaacatcaaattcatatcaataaaaaccttttaacgcagaaaacaaaaaactattacaggcggtattgtatgcgattgttgattatatttccagatcctaaagttcatacagatatacacagcataactcgattaattatattaatctgttaaccagaaggttatattcattaccccctgcgtgtttcaggttattctgcctacggtatatctgtaggtttcccgtttggctgtttatagcgtattgcgtatctcagtaaccgcggtgaccctcacggtggctgaccttatacagaagtgaatatttcagcacaataagagattaaccattcaaaaatcatcatcagagctttatgctaaaaatcagtctgcaatggctataattatgctgagaaaagtagagcgcgtgccgttagccgagaatacatcgcatctgacaacatttggaatgtggctgaaaatcgccagaaaaacaatgcattataatgcattgatttaaaagtaattaatgactaacaacaacgaaaatctcgccgcgagcaaaaaacacacaatcacagagtattttatcgacaaaaagcctataaataaaaatattacactagttgatagttattatatagggatatactctatgcaaagacaaaagtgctttatgatttcactaccaaccatcacctcattctgatcgatacgctacaaggagcattaacatgttctctccacagtcacgcttgcgtcatgccgtagcagacacgtttgcgatggttgtttactgttctgttgtgaacatgttgatcgagatattcctctccggaatgagctttgagcagtcgctttcttccaggctggtggcgatacctgtcaacattttgattgcatggccatacggcgtttaccgcgatctgattatgcgcgtcgcgcgtaaggcaagcccggcgggatgggccaaaaacctggcggatgtattggcttatgtcacctttcagtcacccgtttatattatcatcttgctgaccgtcggtgccggctggcatcagatagtggccgccgtgagttcaaacattgttgtttcaatgttaatgggcgcggtttatggctacttcctggattattgtcgccgcctgtttaaagtgagcagctatcatcaggctaaggcgtaagttagcgtcgcgactggcattgccagtcgcgcttttagtcggttttttcgtcgccaaaaagcccattcagataacgttctaacgctattcgggagctaaagccgtggggaataccgtaatgttcgtgggtctcgccgcctaaatagagcggaaagttttggtaatgatcgcaggttttaatatccgaagccgggtcagccagtgatgagctacggtcttttaatctggggtgaatgatcagcgcggtacgccccatacgcgcctcgcggttaacataaacataattctcgccgcgtcgataaccatacgtcttattcgtcaccacatcgacggtaaaccctgccttttccagtacccgcgccacctcgtcaggtcgtaaatacatattttatcctcattctcttgtactgcgggcttaccttacccgatagcgcgttatcaacgctttcagaaaagtccagaaacgcatgatatcgccgtaacaagcctcagcaggtaaaaatatgaactacactgaaagctacatcgaaatcaatggaggatcatatgcttaacaaaccgaaccgaaacgacgtcgatgatggtgttcaggatattcagaatgatgtcaatcgattagccgacagtctggaagatgtccttaaatcctggggaagcgatgcgaaagacgaagccgaggctgcgcgacgtaaagcacaggcgttgctgaaagagacccgggcgcggatgcagggtcgtactcgcgtaaaacaagccgcctgtgatgcgatggggtgcgcggatacgtttgtgcgtgaaaaaccctggtgtagcgtaggaaccgccgcagcggtggggatttttatcggggcgctgcttagcctgcgtcgctaacgacgtgcgctgccggatggcgacatactttatggggcctgcatcattgccgcaggcccaggtcgcgccattcggcgaaacggttactgtatcgcctgtcgaagctgacatgcgacctgtttcgccatgccagcggaagtaatattggtaaacgacagtaaaatgcccccctttcctgacgaaaccactcgccaacggcttagcgcctgtaccgccagtccggcctgattcgcttttgctacctgcgctttatcatcaccttcaacctcaataaccaattgaataccgcctttctgtaatgtcacgacaaatccctgttctgccagcgcctcttcaatccataaccgtcgctgagcataatgttgacgcatctttttcagatgccgccagaaatggccatcacggataaaatcagccagcgtgtgctgccataacaacggtacgctacagggcatcagcgacgcctgctggcggaaatgctcaatctgctttatcggcaccaccagccaggcggtacgtaatgccggaaagagcgacttactgaacgttccggcgtaaatcactcgctgcggggcatccagactcttgagcggcggaagtggtttaccgtgataacgaaattcgctgtcgtaatcatcttcaataatccaggcctgcacattcgccgcccatgccagaagttgccgtcggcgagttaacgacagcgccacccccaacggactttggtgggcgggcgtcaccaatgcaaagcgcccctgcgggcaatcccgcatccccgccgcgacattcagcccatcggcatcgaccggaatcggcgccagcgtaatcccctcctgcgttatcaccgggcgaattaacggaaagccgggatcttccacccacatgctgtctcccggcacagacaatgtacgcaggattagccgcatagaatccgcataaccggaggtaataaatacctgttccggcagacattcaatgctacgcgaaacccgcaggtaatcgactatcgcctggcgcaaaatcgcctcgccgcagacgtcgcctaatgccagatcgaagcatgtctgcgtgcgcaaccgacgccccattactcgcgcccacttctcgcgtggaaagagatccagcgccggtaaccccatctgaaagggtttcggttccggactttctccggcaaaaacagcgggtatcggcggcgccgtctcaaaccgtagagcgttgctcacaaacgtgcctgcctggccacgtcgctccagccagccctgcgccaccagctcgccataggcattttccaccgtggcgcgagaaacgcccagttcctgcgcccacgtcctactggaaggcaaacgcgttccgggcgcgagttctccttgctcaatggccgtttttaactgacgagcgatgtgctgatagcgcggcatatggtctgctttttctgtaaaaatatggctctcttttacagaccattatagtgctacagtgctcgtcatcaacacgaggagaaacatgatgacaacgttacgccaaccctattatgaactgagcccggaggtttacagcgctctggtgcaggcgaaaaacgcgctggaaaagagcacgcttgaccccacgctgatggagctgatttacctacgtgtttcgcaaataaatggttgtgcattttgcctggagatgcacagtaaagcgctgcgtaaggctggcgtgaatcaagctaaattagatgcgctggcaggatggcgggtaagtcaccatttcagcgagcaagagtgcgcggcgttagcctgggcggaatcggtgacgcacattgctgaaacccacgccgaagataatatttacctgccgctgctcgatcatttcagcgcgcgtgaaatcagcgatctgaccttcgccatcggtttaatgaactgctttaaccgtctggcgatcggtatgcgaatgtgacgcattgttgccggatggcgctgatgtcagccaactctgttatgcgtgaacctgcaggccggatcgggcgttcacgccgccatccggcaaaaattagccatgcctcccctaccccgcggcgttcatcagcggcgttaaaatcaatcgaaaattcccatatcttgtatggttgaatcttaattcaactacatctagtatttcctgtatcaacacacgacaatccgacgcgtttcatcgcgccgttttctcattttaaatggaaatacgaatcatgagcattactatttacactcgcaataactgtgttcagtgccacgccacaaagcgggcgatggaaagccgtggatttgaatttgagatggtgaacgtcgatctggtgccggatgcagcggatacgctccgggcgcaaggatttcgtcaattaccggtggtgatggcgggcgatttgagctggtctggcttccgcccggacatgattaaccgtctgcacccgaccccccacgcggcaaacgcatgagcgcgctcgtctacttctccagcagctctgaaaatacgcaccgctttatgcagcgtctggggctgcctgccacgcgtattccgctcaatgagcgggagcgaattcaggtagacgaaccgtacattctggttgtgccgtcatacggcggcggcgggatggccggtgcggtgccgcgacaggtgatccgctttttaaatgatgaacacaaccgggcgcgcattcgcggcgttatcgcctccggtaatcgcaatttcggcgatgcctggggatgcgctggcgatgtgatagcacaaaaatgcggcgtcccctggctgtaccgctttgagctcatgggcacacaacgcgacatcgataatgtccgaaaaggagtaaatgaattttggcaacaactaccccggagcgcgtaatgcaggaaaccatggattaccacgccctgaacgcgatgctgaatctttacgataaagcaggccatattcagttcgacaaggaccagcaggcgatcgacgccttctttgccacccacgtccgcccgcattccgtgacgtttgccagccagcatgaacgtctggggacgctggttcgggaagggtattacgatgacgccgtcctcgcgcgttacgaccgcgccttcgtccttcgcctgttcgagcacgcccatgccagcggctttcgcttccagacgtttcttggcgcctggaagttctataccagttacacgctgaaaaccttcgacggcaaacgttatctggaacactttgaagatcgggtgacaatggtggcgttgacgctggcgcagggtgacgaaacgctggccacccaactgaccgatgaaatgctttctggtcgctttcagcccgctaccccgacttttttaaattgcggcaaacagcagcgtggggaactggtctcctgcttcctgctccgtatcgaagacaacatggagtcgatcgggcgggcggtgaattcggcgctgcaactctccaaacgcggcggcggcgtcgcgtttttactctccaatctgcgcgaggcgggcgcgccgatcaaacgcattgagaatcagtcttccggcgtgatcccggtgatgaaaatgctggaagacgcgttttcgtatgccaaccaacttggcgcgcgccagggggccggcgcggtttatctccatgcgcaccatccggatattctgcgttttctggataccaaacgagaaaacgctgacgaaaaaatccggatcaaaacgctctctctcggcgtggtgatcccggatatcaccttccggctggcgaaagaaaacgcgcaaatggcgctcttttcgccctatgacatacaacgacgctacggcaaaccgtttggcgatatcgccattagcgaacggtacgatgaattaattgccgatccgcacgtgcgcaaaacctatattaacgcccgtgacttttttcaaacactggcggagattcagttcgaatccgggtatccctacatcatgtttgaagatacggtaaaccgcgcgaatcccattgctggtcgcattaatatgagcaacctgtgctcagaaattttacaggtcaatagcgcttcccgttacgacgataaccttgactatacccacatcgggcatgacatctcctgcaatctcggctcgctgaatatcgctcacgtcatggattcaccggacattggccgtaccgtagaaaccgctattcgcggcctgacggcggtgtcggacatgagccatatacgcagcgtgccctcaatagccgccggtaatgccgcctctcatgccatcggtctgggccagatgaatctgcatggctatctggcgagggaaggtattgcctacggttcgccggaggcgttggatttcaccaatctctatttttacaccattacctggcatgccgtgcatacttcaatgcggctagcccgcgaacgcggcaaaaccttcgccggatttgcgcagtcgcgctatgccagcggcgactattttacgcagtatttacatgacgactggcaaccgaaaacagcgaaagtcagggcgctatttgcccgcagcggcattacgctgcccacacgagaaatgtggctaaagctgcgcgacgatgtgatgcgctatggcatctataaccaaaatttgcaggcggtgccgccgaccggttcgatttcttacattaatcatgcgacctccagcattcatccgattgtggccaaaattgagattcgcaaagagggcaaaaccgggcgtgtgtattaccccgcgccgtttatgaccaatgaaaacctggacatgtatcaggatgcttacgatatcggtccggaaaaaattattgatacctatgccgaggccacgcgccacgtcgatcaagggctgtcgctcaccctgtttttccccgataccgccacgacccgcgatatcaacaaggcgcagatctatgcctggcgaaaaggtattaagtccctgtattacatccggcttcgccagttggcgctggaaggtactgaaattgaaggctgcgtatcctgcgcgctataaggaaagccatatgaaattatctcgtattagcgccatcaactggaacaagatccaggacgacaaagatctggaggtatggaaccggctgaccagtaacttctggctgccggaaaaagtgccgttatcgaatgatattccggcctggcagacgctgagcgccgccgaacagcagctcaccattcgcgtgtttacgggacttacgctgctcgacactatccagaacatcgcaggcgcgccgtcgttaatggcagatgccatcacgccgcatgaagaggcagtgctgtcgaacatcagctttatggaagcggtacacgcccgctcttacagttctattttctccacgctgtgccagacgaaagaggttgatgccgcctacgcctggagcgaagaaaacccaccgcttcagcgtaaggcgcagattattttagctcattacgtcagcgatgaaccgctaaagaaaaagattgccagcgtctttttagagtcttttctgttctattccggcttctggttgccgatgtatttctccagccgcggtaagctcacgaacactgccgacctgattcgtttaatcattcgcgatgaagcggttcacggttattatattggctataagtatcagatagcgctacaaaaactatcggcaatcgagcgtgaagagttaaagcttttcgcgctggatttgttgatggaactgtacgacaacgaaatccgctacacagaagcgttatatgcggaaaccggctgggttaacgacgtcaaagccttcttgtgctacaacgccaataaagccttaatgaacctgggttatgaggcgttatttccgccggagatggcagacgtgaatcccgcaatccttgccgcgctctcgccgaatgccgacgaaaaccatgatttcttttccggctcaggttcatcttatgtgatggggaaaacagtcgaaaccgaagacgaagactggaatttttaaccttacgggcatgggaaataacgttacatttcccatgcctttatttcaagcaatagggagtcaaatcgcgcaaatattacaacatgtcctacactcaatacgagtgacattattcacctggattcccccaattcaggtggatttttgctggttgttccaaaaaatatctcttcctccccattcgcgttcagcccttatatcatgggaaatcacagccgatagcacctcgcaatattcatgccagaagcaaattcagggttgtctcagattctgagtatgttagggtagaaaaaggtaactatttctatcaggtaacatatcgacataagtaaataacaggaatcattctattgcatggcaattaaattagaagtgaagaatctgtataaaatatttggagagcatccgcagcgtgccttcaaatatattgaaaagggactatcgaaagagcaaatactggaaaaaacggggctatcgcttggcgttaaagacgccagtctggccattgaagaaggcgagatatttgtcatcatgggattatccggctcgggtaaatccacaatggtacgccttctcaatcgcctgattgaacccacccgcggacaggtactgattgacggcgttgatattgccaaaatatcagacgctgagcttcgcgaggtgcgcaggaaaaagattgcgatggtcttccagtcatttgcgctcatgccgcatatgaccgtgctggataatacggcattcggtatggaattagcgggcatcgcggcgcaagagcgtcgcgaaaaagcgctggacgccttgcgtcaggtggggcttgagaattacgctcacgcctacccggatgaactttccggtgggatgcgtcagcgtgttgggcttgcccgcgcgctggcaatcaaccctgatatcttattaatggatgaagcgttttccgccctcgatccattaattcgtaccgaaatgcaggatgagctggtgaaattacaggcgaaacatcagcgcaccattgtctttatttcccacgatcttgatgaggctatgcgtattggcgacaggattgccattatgcaaaatggcgaggtcgtacaggttggtacgccggatgagatcctgaataatccggcaaatgattatgtccgcacgttcttccgtggcgtggatattagtcaggtctttagcgccaaagatattgcccgtcgcagcccggtcggattaattcgtaaaacgccaggtttcggtccccgttcggcactgaaattattacaggacgaagaccgtgaatatggttacgtcattgagcgtggcaataaattcgtgggcgtcgtgtccatcgactcattaaaagcggcattaagccaggcgcaagggattgaagcggcgcttatcgacgaccctttagtcgttgatgcgcaaaccccactcagcgagttgctctctcacgtcggccaggcgccctgcgcggtgccggttgtcgatgaagaacaccagtatgttggcattatttcaaaacgtatgttgctacaggctttagatcgcgaggggggtaacaatggctgatcaaacgaatccgtgggataccgcacaggtggccgatactacgacgcaaacggctgatgcctggggaacaccggcaggcgtagccacggacggcggcagtaccgactggttgaacagcgcgcccgcgccagcccctgaacacttttctcttctggacccgttccataagacgctgatcccgctggatagctgggtcacagagggaatcgactgggtcgtcacccatttccgtcccctttttcaggggattcgtgtgccggtggattacatcctcaacggctttcagcaactgctgctgggaatgcccgcccctgtggcgattattctctttgcgctgattgcctggcaggtttccggcgtgggcatggggatcgcgacgctgatatcgctgatcgccatcggcgcgatcggcgcctggtcgcaggcgatgattaccctggcgctggtattgaccgccctgttgttctgcgtcgtgatcggattaccgatgggaatctggctggcgcgcagcccgcgcgcagccaaaatagttcgtccgctgctggatgcgatgcagaccacgcccgcgtttgtctatctggtgccgattgtcatgttattcggcatcggtaacgtgccgggcgtggtggtgacgattatttttgctctaccgccgattgtacgcctgacgatcctgggcattaaccaggtgcctgccgacttaattgaagcgtcgcgctcgttcggcgccagcccgcgccaaatgttgttcaaagtgcaactaccgctggcgatgcccaccattatggcaggcgttaatcagacgctgatgctggctctctcgatggtcgtcatcgcctcgatgattgcggtcggcggacttggccagatggtactacgcggcattggtcgtcttgatatggggctggcaaccgtcggcggcgtcggcattgtgattcttgccatcattctggaccgtctgacgcaggccgtcgggcgcgactcgcgtagccgcggtaaccgtcgctggtataccaccggtcctgttgggctaatcacccgccctttcgttaagtaactctcctgacgcccggtgacattgcgcttaccgggcttacaactccctaccataattaaaggaacaacgatgcgacataccgtgatatttgcctcagcgtttgccacccttgtcaccgccagcgctttcgctgccgacctgcctggcaaaggcattaccgtccaacctatccaaagcacgatttctgaagagaccttccagacgttactggtcagtcgggcgctggaaaagttgggttataccgtaaataagccgagtgaagtcgattacaacgtaggctacacctccatcgcctctggcgatgcgacgtttaccgccgtgaactggcaaccgctgcatgatgatatgtatgccgcagcaggcggagacaacaagttttaccgcgagggcgtcttcgtctccggcgctgcgcagggctatctgatcgataaaaaaaccgccgagcagtacaacatcaccaatatcgctcagctaaaagatccgaaaatcgccaaaatcttcgatactaatggcgacggaaaagcggacatgatgggctgctcgccgggctggggctgcgaagccgtaatcaatcaccagaataaagcgtttgatttgcaaaaaaccgttgaggtcagccacggtaactatgcggcgatgatggctgataccattacccgttttaaagaaggcaagccggtgctgtattacacctggaccccgtactgggtgagcgatgtaatgaagccgggtaaagatgtcgtctggctacaggtgccgttctcctccctgccaggcgaacagaaaaatattgatactaaactgccgaacggcgcgaactatgggttcccggttaataccatgcatattgtcgccaataaggcatgggcggagaaaaatccggcggcggcgaaactgttcgccatcatgaagctgccgctggcggatatcaacgcgcagaacgccatgatgcatgccggtaaatcgtctgaagccgatgttcagggccacgtagacggctggatcaacgcccaccagcagcagtttgacggctgggtgaaagaagcgctggccgcgcagaaataagatcgttttttatgccggataaggcgcagttcatgcgccgctatccggccaacgcaatctctcctcaaagcgcacgattcatcacgtcaccgttcccctttattcatcaacatccgctatgattgttttcccaggaaataattatctgaatcacgattaccataatgacgaaacccactcatgagcttagcccggcgctgatcgttttaatgtctgtggccacgggtctggcggtcgccagcaactactatgcccagccgctgcttgataccatcgcgcatcacttttcgctttccgccagctccgcagggtttatcgttaccgccgcgcagttgggctatgccgctggcctgttgtttctggtgccgctcggcgacatgtttgaacgccgaacgctgattgtctccatgacgttgctggcggctggcggaatgctgatcaccgccagcagtcagtcgcttagcatgatgatactcggaacggccttaaccggactgttctccgtggtggcgcagattctggttccgctggccgccacacttgcgacgcccgccacccgcggtaaagtggtcggcaccattatgagcggcctgttgctggggatcctgctggcgcgaacggtcgccggactgctggcaaacctcggcggttggcgcaccgtattttgggtagcgtcggcgctgatggcgctgatggccgtcgcgttatggcgcggactgccaaagctcaaatccgacacccatcttaactacccgcaactgttgggttctgtattcagcctgtttattcacgataagctgctgcgtacccgcgcactgctgggctgtctgacctttgctaatttcagcatcctctggacatcaatggcctttttgctcgccgcgccgccgtttagctactccgaggggatgattggcctgtttggcctggcgggggccgccggcgctttaggcgcgcgtccggctggcggatttgccgataaaggtaaatctcacctcaccaccacgttcggcttactgctgctgttactctcctggctggctatctggcttgggcacacctcggtactggcgctgattattggcattctggtactggacctcaccgttcagggggtacatatcaccaatcagacggtcatctatcgtttgcatccggatgcgcgtaaccggctcaccgccggctatatgaccagctactttatcggtggcgccgcggggtcgctgatttccgcctccgcctggcaacatgccggctgggccggcgtttgtctggcgggtgtcacggtagccttacttaatttactggtctggtggcgaggttttcaccgacaggaagccgtaaattaagcggatagtgagcgtttacctttgtttaagctccttagggtgttaaggagctccccagtctgttaaggttatgctattcatttatcatggttatttttataccggtgaagaataatataattctatggaaagccctgcatccccatctgctcccaggccaatagcgcccgttcaaggattcgaaggtcgttcaccgatagctatccgtgatattccggtggcttttgcatcgggttgtaaggccgtttacccggctttcgcccctcccgcttatcgttctctcctgattttttcatgcaggcactcacgcttttctcgtcattcctggatttgccgcaggcggcgctttaccgggcccaatgttcccgctgacgtctcagtctgcgtatcattggttgctttatagcctgaaagaatgattttgtattaataatacatttactttatttgtcactgtcgttactatatcggctgaaattaatgaggtcatgcccaaatggatagttcgtttacgcccattgaacaaatgctaaaatttcgcgccagccgtcacgaagactttccttatcaggaaattcttttgactcgtctttgtatgcacatgcaaggcaagctcctggaaaaccgcaataagatgctgaaggctcaagggattaacgagacattgtttatggcgttgattacgctggagtctcaggaaaaccacagtattcagccgtctgaattaagctgcgcgctgggttcatctcgcaccaatgcgacacgcattgcagatgagctggaaaaacgcggctggattgagcgtcgtgagagcgataacgaccgccgttgcctgcatctgcaattaacggagaaaggccaggcatttttgcaagaagtgcttccgcctcagcatcattgtctgcatcaactctggtcatcacttagcacagccgaaaaagatcaacttgagcacatcactcgtaaactcctgacgcgtcttgatcaaatggagcaggaaggcactgttcttgaggcgctgcgctaaagcgccgacccgctcaaaaatccagattaataacaggaaagcggacaggccggcacgcgttactgctggcctttctgacaacaggtcggctcagccgatgtgaataataagatcgtggagaacaacatgagcgcaaatgcggagatccaaaccccgcagcaaccggctaagaagaaaggcaaacgcaaaacagcgctgctacttcttaccttgctctttgttattattgccgtggcatatggaatttattggtttttagtattgcgtcatattgaagagacagatgatgcttacgtggcagggaaccaggttcaaatcatggcgcaggtgtcaggcagcgtgacgaaagtctgggctgataacaccgactttgtaaaagagggcgatgttctggtcacgctcgatcagactgacgccaaacaagcgtttgaaaaagccaaaacggcgctggcctccagtgtgcgccagacgcaccagttgatgattaacagcaagcagttgcaggcgaatatcgacgtgcaaaaaaccgccctggcgcaagcgcaaagcgaccttaaccgtcgtgtgccgctgggtaatgccaatcttattggccgggaagagctgcaacacgcccgcgatgccgtcgccagcgcgcaggcacagctggatgtcgccattcaacagtacaatgccaaccaggcaatgatactcaacagtaatctggaagatcagcccgcggttcaacaagcggcgaccgaagtgcgtaacgcctggctggcgctggagcgtactcgcatcgtcagcccaatgactggttatgtctcccgccgcgccgtccagcctggcgcgcaaatcagccccaccacgccgctgatggccgtggtgcctgcaaccgatctgtgggtggacgctaactttaaagaaacccaattagcgaatatgcgcattgggcagccagtgacggtgattactgatatttatggcgacgacgtaaaatacaccggtaaagtcgtcggtctggatatgggaacaggcagcgccttctccctgctgcccgcgcaaaatgcgacgggtaactggattaaagtggttcaacgtctgccggtacgcgtcgaactggacgcccgccagttagaacaacatccgctgcgtattggtttatcgacgctggtcaccgtggataccgctaatcgcgacggtcaggtactggccagccaggtacgaacgacgccggttgccgaaagtaacgcacgcgaaattaatctcgcgccggtcaataaactgatcgacgacatcgtacaggctaacgcgggttaatcctgaggtgcgtgtgatgcaacagcaaaaaccgctggagggcgcgcagctcgtcatcatgacgatcgcgctgtcgctggcgacattcatgcaggtgctggactccaccattgccaacgtggcgattccgaccatcgccgggaacctgggttcttccctaagccaggggacatgggttatcacctctttcggggtggcgaacgctatctcgattcccttaaccggctggctggcgaaacgttttggcgaagtcaaactgttcatgtggtcgacggtcgcctttgccgcggcctcctgggcctgtggcgtatccagcagcctgaatatgctgatcttcttccgcgtggtgcagggcgtggtcgccgggccgctgattccgctctcgcaaagcctgttgctgaataactatccgcctgcaaagcgctccattgcgctggcgctctggtcaatgaccgtcattgtcgcgccgatttgcggcccgattctggggggctacatcagtgataattaccactggggatggattttcttcatcaacgttccgattggcatcgccgtcgtcctgatgacgttacacacgctgcgcggacgtgaaacgcataccgaacggcgacgtattgacgccgtcgggctggcgctactggtgattggcatcggcagcctgcaaattatgctcgatcgcggtaaagagctggactggttctcctcgcaggaaattatcatcctgaccgtggtcgccgtcatcgccatcagtttcctgatcgtctgggaactgaccgacgatcaccctatcgtcgatctttctctttttaaatcgcgtaacttcacgattggctgcttgtgcatcagccttgcctatatgctctatttcggcgccattgttctattgccgcagcttttgcaagaggtgtacggctataccgcaacgtgggcaggtctggcgtcagcgccagtcggtattattccggtaattttgtcgccgattatcggacgcttcgcgcataaactggatatgcgcaggctggtcacgttcagcttcattatgtacgccgtctgtttttactggcgcgcctggacgttcgaaccgggtatggatttcggcgcttccgcatggccgcagtttattcagggatttgccgtcgcctgcttctttatgccgctgaccaccattacgctctccgggttaccgccagaacggctggcggcggcatcaagcctgtcgaacttcacgcgaacgctggcaggttccatcggcacctcgattaccaccactatgtggaccgatcgtgagtcgctacaccatgctcagctcaccgagtcggttacggcgtataatccaaacgctcagactatgtacgataaactggaaggcttagggatgacgcaccaacaggcgtcaggctggatagcccagcaaatcacgaatcaggggctgattatttccgccaacgaaatcttctggatgtcggcggggatcttcctggtgctgctcggcctggtgtggttcgccaaaccgcccttcggtgcgggcggcggcggtggcggcgcgcactaactatctgataaaagggatctgcggatcccttttttagtagaccaacaatcagaagaaatatttgaatctcagacgcccgccgtaacgcgcatcttcactgttatcgccattattcggattggcctctacccatgaagcataggcaccgaggtagatgttaaagtttttcatatccatcacgttggggaataaatatgaggcatgaatagtgtgaatgtcataattgccgggatcggtgacccagcaatcgtcctcacaaacggcatcgatattggtagcattaaaggcttcgattttgttatgcgcatagatataacccagttcaaatcgatgccacaacgcattcaccccggcggtaaaatctgtctcatcggtcgcgtccatataggcggtattcaggttaatcactgcgccatcttccgggtcagttttttgaccattccaggtcatggtaaaaccatagcccgtacgatctgactgatcgatccacttcccattctcataatagccataggcgttgttaacgacgttactttccatcgctatcgccgttgaaaaacgcccgttttgccaggcgataaccggacggacgtaagccacgtttttatcgttgcttaaatccattccgtggtactgcttctcggtatataacgtactgccattttccagcaatgtgttaacttcgaaataccagttgtcgatggttttactcagcaggaagttacccccgctgtcgctacgtccccgtccttctttcatcatatagatatagccgtaaccgtcactgtaaagatcgttcgctgtattccccgaatattcaataaacgtatcctgattcagcgggaacatatcgtaggcttcaaaacgaccaaccttaattttccagtcattctcacgaccaaagaagaaaacggcatcatcaaggttcatttttccggtcaggtccgccagaggctgtacagagaatccggcaaaattaccgttgtccagccgctggtagccatcaaagcccagcaacaggcgtccgttaatatcccagcgttcattggttcccggtgcccaatctttattcgctgacgttctcgtcgatgtcagactaccggaacggcttgccgcatccatattaaattcgacatcgccatagaacttaatatcgctgaatccggataaagtcagcttcggcggcgttttatctgctgcaatgggctcggcggactggacattcaccgtcggcgtagcggcgacctgctgctgtttcaacgagcgaatttgcgcctcggcatcggatgcccgtttttcagcattaacaacacgttgctccagttcagccagacgctgctcaatagtgatattattcgctgcccaaaggttatgagaaaagcaagcaccgatcatcagcgctaaatatttagccttcattttttatcccttaagtttgatgtataccagataagatttgctaaaaaccccatcgaccggctattagtagagtcttgttattacctggatatctggcgcattccattatgtttttctattaattatttatgatttttagtttatgtgatcaatacactctggcatcgtgagttatccgccttttctgtttaccagatcacattttattatttaacaggccaggcattacttaatttaaaatgtattctcgccgcaaatataataaacgcaaattatattaagcaataaaaaaccccggccataaaccggggttaatttaaatactggaaccgcttacaaataagactaaatatgcagttcctgcagtttttctttcggcagcgccagctctttattgctgttcacgcgcacatcacgctccagaatatgacgggcaatgtcctgcgcttcactgagcgagtgcatctgatacgtaccgcactggtaaacgttcagctccgggatctggttttgatcctgcactttcagcacatccgccatcgccgctttccaggcgtcggcaacacgctgctcgtccggcgtgccaatcaggctcatgtaaaagccggtgcggcagcccatcggcgagatatcgataatctcaacgccgttaccgttgaggtggtcgcgcataaagccagcaaacagatgctcaagcgtatgaatccctttttccggcatcacttctttgttcggaatgcaaaaacgcagatcaaacacggtgattgcgtcgccatgcggggtgttcatcgtttttgcaacccggaccgccggcgcttgcatccgggtatgatcgactgcgaagctatctaataatggcatttagtcacctccgataattttttaaaaataaactgaactctttgttccggggcgagtctgagtatatgaaagacgcgcatttgttatcatcatccctgttttcagcgatgaaattttggccactccgtgagtggcctttttcttttgggtcaggcgtgttttgcaagccacgcggcaaacggctcggtatccgccgcctcaatctcctgctgacgacgtactgaagcgtcacgttcagcaataaactcttcttcctgtaaaatctccagcggctcttcgcgtaacagattacggtaagcctcaccgaacgctttcccggtgccgccaatgccttcatcaatcatagaccgtaggatccgggcggagaatgtcagttcaggattatcaaagcaggcgaccaactcgtcacacaccttttgatactcctctcccccgtggatactgtccagcgtttgcgccacgcgtttcagatcgcggaaaagatctttcccgactttgggcagcgggaactgcgcagtttcacagccaatgcctaacgtcaggcccggcttacgcccttccagaataacgcgattccagttagtacgcgtacataacagctcatcgctactcatttccggcgcatcggccaatacgcaccagaccataaacagatcgaggaagcgcacctgttgctcgtctacgccgatcggtgagaacggattaatatcgagagaacgaacttcaatatactcaataccaccacgcagaagcgcgtcagaaggcgattcgccgctgcgcgtcacgcgcttgggacgaatgggcgcgtacagctcattttcaatttgcagaacgttgctgttaatctgtagccgcttaccgtctttttccacaccaatccgtgcgtactcctcggaaggggttttaatcgcgcgcttcagacctgcaacgtattcatgcaaatcgttaaacgtaattccgagattgctttgcgacttattggtatagcccaaatcactcaaacgcagcgacgtcgcatacggcaggtagtacatgccgcagtccgttttttcaaacggtaatgtggttggctttccttgcaggaaagaggaacaaatggccggagacgcgccaaacagataggggatgacccagccaaaacggtaatagttgcgaatcagacgaaaatagccggcagaaattttttcttttgccgcttcgccttccgtaacgccgcatttcgcctgccagaacgccatcggtaatgaaaaattgtaatgtacgccggagatggtttgcatcaaagcgccataacgatttttcagcccttcgcgatagagcgtcttaaaacgcccggtattggatgtgccgtactgcgccagctctatgtcctgcccttccgcaatatagcagggcatacttaatggccacatccgctcatcgcccagtttcctggccgtataccgatggagatcgcgcataaaggtgagcatatgctggatatcgccatcgactggcgtaataaactccagtagggcttccgcaaaatctgtggtaatccatttatgggtcagcgctgaacctaacgcttcaggatgacctgttgtcgccagcgtgccatcagcattgacacgcagcgtttcgcgctctaacccgcgctgtatcccctttaacgcctgaggatgtttttccagccaggccagagcctgtgatacgtccgggatcaaattgacctcccgcctgtccaaatcgttttaataagcataactgtaatggcggccatacatgccaaacctacaattattaccaccacatcatgccctgaaccgtcgccgctgcgagcgcaacatagcgcagcgccttaccaagacacaaaaaaaagatcgtccgcccccacgggatgcgcatccatcccgctaacaggcacaacaaatcaccgatgaccggcatccagcttaataatagtgtggctgcgccataacgctttagccagccagtcgctttttcctgccaacgcgacgttttgcgcagcggaaagaaacgcccaagaataacgttagttacccctccaaggctattacccattgttgctgttaagactaagacccagggatggctgacgccggagaccagcatagcaaccaaaaccacctcagaattaccgggtaacagcgtcgcgctgagaaaactactggcaaacagagacaggagcgacagtccgtcactcacaatagtcggacatccacggcatccattcccgccgcccgcgccgcctgtaaaccaaaatcggcatcttcaaataccacgcactgcgtcggcatgacgcccatccgctgggcgcacagtaggaaggtgtcaggcgcaggtttgtgatgctgtacgtgatctgccgccacaaccgcatcaaaataacgacgcagccccagatgcgctaacagggcttccgcgatagcgctttcgctaccggtaccgaccgacatgggacgccgcccatgccacgctttaaccacctcaaccagcggcagcggttctacgcagtccagcaggatgctttttaccgcgtcggttttctcacgcgccagtgacaggggatcaagatcggcatggttaagctcaatgattgactgggcgataagccaggttggcgaaccgttaagcgcgaccattgcctgttcatcaaaacgaagaccatagcgccccaaaacctcacgccacgctttgcgatgcgtgggttcggtatccaggagagtaccgtccatatcaaaaatcaaaccagcataacgtgcgtacatcgtgttctcgcaaaccgaataaccagacagtactttatcgcaattggttgattttgtcgctaatagagatgaagaggtatattcaggataagggggaaaagcgattgcagggcagtaacgtatccgggaggattactcgcccttcgggccgttgctgatgcaacgttatccttctgatgccagcggtgattaccgctatcttatctgcatcttcatcgctgaaagtatggagaatatggtgcatccgggaggattactcgccttacggctcgcccttcgggccgttgctgacgcaacgttatccttcctggtgccagcggtgattataactatcttatctgcatcttcatcgctgaaagtacggagaatatggtgcatccgggaggattcgaacctccgaccgctcggttcgtagccgagtactctatccagctgagctacggatgcattggaaatgatgtttactacaagatttgatgtcgcatttactgccacactaaataagatggtgcatccgggaggattactcgccttacggctcgcccttcgggccgttgctgacgcaacgttatccttcctggtgccagcggtgattaccgctatcttatccgtatcttcatcactgaaagtacggagaatatggtgcatccgggaggattcgaacctccgaccgctcggttcgtagccgagtactctatccagctgagctacggatgcatcggaaaacttgctttactgccgatattgataccgcggtgaaagccgtatcaagtaagagatggtgcatccgggaggattcgaacctccgaccgctcggttcgtagccgagtactctatccagctgagctacggatgcatcgggaaacttactttactgcagattttgataccgcggtgaaagccgtatcaggtaagagatggtgcatccgggaggattcgaacctccgaccgctcggttcgtagccgagtactctatccagctgagctacggatgcaaatggcggtgaggcggggattcgaaccccggatgcagcttttgaccgcatactcccttagcaggggagcgccttcagcctctcggccacctcaccacacgcctcttacgagtgcttcgaagaacttgttctgctcatcgtcgctgcgtggcgcacatattactttctgggacttataagtcaaacaatttttccagagcttttatcgtttgcacacttcacgctcaattagtctgtaaaaaagccaaaaagagtgttttatcaacagataatttgatgacacgctggccgccaaaagcgcaccatatcaacagtgaggttgaaaaaagtcatgaagggacaacgcgggcgagcgagaagagaggctgcgtctcacccgaaaagtgagacgcgaaaaccttagtaactggactgctgggatttttcagcctggatacgctggtagatctcttcacgatggacagaaacttctttcggggcgttcacgccaatacgcacctggttgcccttcacccctaaaactgtcacggtgacctcatcgccaatcatgagggtctcaccaactcgacgagtcagaatcagcattctttgctccttgaaagattaaaagagtcgggtctctctgtatcccggcattatccatcatataacgccaaaaagtaagcgatgacaaacaccttaggtgtaagcagtcatggcattacattctgttaaacctaagtttagccgatatacaaaacttcaacctgactttatcgttgtcgatagcgttgacgtaaacgccgcagcacgggctgcggcgccaacgaacgcttataattattgcaattttgcgctgacccagccttgtacactggctaacgctgcaggcagagctgccgcatccgtaccaccggcttgcgccatgtccggacgaccgccacccttaccgcccacctgctgagcgaccatcccaatcaattcccctgctttaacccggtcggtcacatccttcgacacgcccgcaatcagagaaaccttaccttcaacaaccgttgccagtacgataacggtagaccccagttgatttttcagatcatcaaccatggttcgcagcattttcggctcaataccagcaagctcgctaaccaggagcttcacgccgttgagatcgaccgctttactggaaagatttgcactctcctgcgctgcggcctggtccttcaactgctgcaactctttttccagctgacgtgtacgttccagcacggcacgcactttgtcgcccagattctggctgtcgcccttcagcagatgcgcaatatcgtttaagcgatcgctttgcgcatgaacggtggccatagcgccttcaccggttaccgcctcaatacgacgaatgcccgctgcggtgccggactcagagataatacggaatagaccgatatcaccggtacgactggcgtgagtaccgccgcacagttcagtagagaaatcgcccatgctcagaacgcgtacacgttcgtcatatttctcgccaaacagcgccatggcccctttcgccttcgccgcgtcgagatccatgatgttcgtttcaatcggcaggttgcggcgaatttgcgcattcaccaaatcttcaacctcacgaatctccgacggcttcatcgcttcattgtgcgagaagtcgaagcgcagcactttatcgctaaccagcgaacctttctgcgcaacgtgtgtcccaagcacctggcgcaacgccgcgtgcatcaggtgcgtggcggagtggttcagacggatacgtgcgcggcgcgcttcatctacgtcagcctgtaccgcatcgcccactttcagagcgcccgcagacaatttgccgaggtgaccaatcgcctgaccatatttttgcgtgtcgtccacagcgaaagtaaatccagcgcctttcagctcgcctttatcgccaacctgaccgcctgattccgcatagaatggggtctgatccagcacgacaaccgcttcctgtcccgcgttaatcgcttcaaccgctttaccatcgacaaacagcgcagtcactttgccgttcagttccagatggtcataacctttaaattcagaagcgctatcaacgcggatcatcgcgttgtagtccgcgccaaaaccgctagcttcgcgcgcgcgacggcgttgctcttccatagcggcttcaaaaccggcttcatcgactttgatgttgcgctcacggcagacgtccgccgttagatcgaccgggaaaccataagtatcatacagacggaaagcggtttcgccgtccagggtgtcgccctgcaatttcgccagttcttcatccagcagcgccagaccgcgctccagcgtacgggcgaactgctcttcttccgttttcagaacctgttcgacctgcgcctgctgacgtttcaactcttcgcctgcggagcccattacctcaatcagcggcccaaccagcttgtagaagaaggtctctttcgcgcccagcatgttgccgtgacgaaccgcgcgacgaataatgcgacgcagcacatagccacggttttcattcgacggcagcacgccatcggcaaccaggaatgcgcaagaacggatgtggtcggcgataacgcgcagcgatttattacccagatcggtggcgccagtgactttcgctaccgcttcaatcaacgtgcggaacaggtcgatgtcatagttagagttaacgtgttgcagtaccgcggcaatacgctccagccccataccggtatctacagacggtttcggcaatggttccatcgtcccgtcagcctgacggttgaactgcataaagacgatgttccagatctcaatatagcgatcgccgtcttcttccgggcttcccggagggccgccccagatgtggtcgccatgatcgtagaagatttcggtgcacggaccgcagggaccggtgtcgcccatctgccagaagttatccgatgcgtatggcgcgcctttattgtcgccgatacggataatacgctcgcgcgggatgccgacttctttttcccagatctcataggcttcgtcgtcggtttcatagacggtgacccataaacgctcttttggcagagcaaaccagttttcaccggtcagtaattcccatgcgaactgaatggcgtcgtgtttgaagtaatcgccgaagctgaagttgcccagcatttcgaagaaagtatggtgacgtgcagtgtatccgacgttttccagatcgttgtgtttacctcccgcgcgtacgcaacgctgggaagtggttgcacgggaataattacgtttatcgagcccaaggaaaacatccttgaactggttcatcccggcattggtaaacaacagagtggggtcattgttaggcaccagggaactgctggcaactacctgatgccctttactatggaaaaagtcgagaaacgcctgacggatctcagcggtgctcttgctcataattatcctgaaatcaagctacacttcatccttcaggccgcctctgcgttggctgcgagtttcccggtcacgcgttcccgaggctcacttgccgctttgatgcggcttgaatgattttgtgtatttaaggaatattcgtcgcagacgctgttcgccgttaagcaacccgcgtccagacggaaaaagtgggaataagataagttttctttaccgggaagtaaaatcccgtatgcgctcaatctgcaaaatttcgccatatttgctggatattgtccatcagatacccgcgatagagcaaaaagcgctgtaccttaaccttttctgaaaagtttgaagggagcggctcgccatatttgcgaacggcctgttcacgtgccatttcactccagtcaatttcacattctcgcatcgctttttcagtcgattcacgggaaatgcctttctgattcaactcctggcgaatacgcgccgggccatagcctttgcggctacgactggcgataaagcgcatcacgaagcgctcgtcatcaagatagtgatgttcgtggcaccaggcgatcacgcgttcataatcgtctgccgtcgcatcaatctcttccggcccatttttgcccatcaccggcgcggagagtttacgccgtaattcctgctcgctgtgatcgcggacagcaagaatacgtaccgcacgatcaaggagacgagcataagcgggacggcgcgatgtgggttcactcataaaaaaccttaacagggagaaatgccaaaagggccgcataaatgcagcccttgatggtaatttaacgttttgctgaatggcggcttcgttttgcccgccccaccatcacctgatgattaaaaatcttcgttggtttctgcaacgccttcgctatcgtcaacggcgaaatcgggcgtggcattctgattactcaacagtaattcacgaacccttttctcgatctctttcgctgtcgccgggttctctttcagccaggtagtcgcgttcgctttaccctggccaatcttctcgccgttgtagctgtaccatgcgcccgctttctcgatcagcttctctttcacgcccaggtcaaccagttcgccatagaagttgatgccttcaccgtagaggatctggaactcggcctgcttaaacggcgcggcgattttgtttttcaccactttcacacgcgtttcgctacccacgacattatcgccctctttcaccgcgccaatacgacggatatcaagacgaacagaggcgtagaatttcagcgcgttaccgccggtggtggtttccgggttaccgaacatcacgccaatcttcatacggatctggttgatgaaaatcaacagcgtgttggactgtttcaggttccccgccagcttacgcatcgcctggctcatcatacgcgccgcgaggcccatgtgagagtcgccgatttcgccttcgatttccgctttcggcgttagcgccgctacggagtcgaccacaatgacgtccaccgcgcctgaacgcgccagcgcgtcacagatttccagcgcctgctcgccggtatccggctgagagcagagcaggttatcgatatcgacgcccagcttgcgtgcgtaaacagggtcaagcgcgtgttccgcatcgataaacgcacaggttttaccttcacgctgcgcagcggcaatcacctgcagcgtcagggtcgttttaccggaagattccggcccgtaaatttcgacgatacgccccatcggcagaccgcccgcaccgagtgcgatgtccagtgaaagcgaaccggtggagatagtttccacatccatagaacggtcttcacccagacgcatgatggagcctttaccaaattgcttttcaatttggcccagtgctgccgccaacgctttctgtttgttttcgtcgatagccattattactcctgtcatgcaacttggtattgaaccggatagtgaattcgtactgttgaagcaattatactgtatgctcatacagtatcaagtgttttgtagaaattgttgccacagggtttgtagcgcgtatgtcgtcgcctgtcgacgcaccgattcacggtcgccgctgaagcattcccgacgcgtaatcccttctccactgacgctggcgaaagcaaaccacaccgtaccaaccggcttttcttcactgccgccatccggcccggcaatcccgctaatagcgacagcaaaatcggcgcgagcggccttcagcgccccgatcgccatttcgaccactacgggttcgctgaccgcgccatgctgcgccagagtctcttcacgcacgccaatcatctgcgctttggcttcattactataggtgacaaagccgcgttcaaaccaggcggaacttccggcgatgtcggtaatggctttcgccagccagccgccggtacaggactctgctgtcgttacggtcgccccgcgcgcttttaacgccagcccgacctgctcgctaagccgcatcagttcactgtcagtcatcatgacctctgtcagttagaaatcctgccgcacaagatagcactttctcaccagagatggggacgagctgtcgattttacgagtcggattccgaaaaaatgccagcaggttatttatgcagaatgaaagaggtagcacttgactaaatagcagtaccatgtcgctaaatttacacgtacggagagaaagcaaggatgtcactcaaaaaaacggaaagcacacagcacaaactgaaacaaacctgtcaactacggctgtggttaattgtgggtggagtatgttcattaggaatgggagtactgaatatattgtcgtcaggctattttgaaccgtatgacggcggtcaaattatcttaggcctgggatgtctgggatatagtctggcactatcaaagaagatatcccacttgcaggcagagaatcagcccaaaaagccataataatagcggagggggtgctcccctccctaagcgtaaattagcgcacccgcgccagcgctaccgcctggcccagttgccaaaccgccatcgcataatgcgtgctgtggttatatcgggtaattgtgtagaagttcggcaggccgtaccagtactggtatcccgtaccgatatccagacgcagcaggctggcttcctgatgattgcccaacgattgctgcggcgttaagcctgcggcggcaagctgagagatgctgtattttgttttgaaaccattcgccaacccaggcgcctgaccactcgccggcaccgcaaccatatcgcctttcacccaaccatgcgccttgaaatagttcgccacgctgccgatggcatctaccggatcccacaagttaatgtgcccatcaccattgaaatcgaccgcatattctttataggaagatggcataaactggccgtagcccatcgcgcccgcaaaggaacctttcagattgagcggatcgtcttgctcatcgcgcgccatgagcaggaaggtttccagctcgccggagaaatattccgcccggcgcggatagttaaatgacagcgtcgccagcgcgtccagaatccgcgttttccccatgatacgtccccagcgggtttccacgccgatgatgcccacgatgatctccggcggtacgccgtatacctgccaggcgcggttcagcgcgtcttcatactgattccagaacgcgacgccgttttgcacgttatccggcgtaataaattgtttgcggtagcgcaaccaggcgccatttggtccggcgggcggctgagtggtcggcgcttgtctgtccatcagacgcaggacgtaatccagtcttttagactgcgagaggatctcttgcaactgctgacggtcgaaaccgtgtttactgaccattttatcaatgaactgctgcgcattagggttgttggcgaagtcgccgcccatttgcatgacgttatgctgcggctcaagcagaaagccgccggaaggcgtgcccgtcgtcgcttgagtctcggaagattttggcgtgctgctacaggcagcaagcaatacgcaaagtggaagtaacgctacataacgacgcttgaacatgagacatccattaaacaaattcagccagggagaagtatggtaaagcatcccccgccgcacaaggaagcggcacaagagaataaatcacctttctcctcttttcagtttgtatacgctccctcactcccacaatctttcaatttaaaatatttttcttttattttgcgatcacaataacacttttaaatctttcaacatgattacaatgaacaggaaattagcaagaaaactaaaaaccctacaggagagaacaatgatcgaaaccattacacatggtgcggagtggttcatcgggttattccagaaaggcggagaggtgtttaccggtatggtgacaggtattcttccgctactgataagcctgctggttatcatgaatgcgctcatcaattttatcggccagcagcgtattgagcgttttgcccaacgttgtgccggaaatccgctatctcgttacctgcttttaccgtgtatcgggacatttgttttttgtaatccgatgaccctgagtttgggacgctttatgccggagaagtacaagccgagctattacgcggcggcctcctatagctgtcactccatgaacggtctgtttccgcatatcaatcccggcgaactgtttgtttatctggggatcgccagcggactcaccacgttagggcttcctctcggcccgctcgcggtgagctatctgctggtaggtctggtgacgaacttcttccgcggttgggtcaccgatctcaccaccgctatttttgagaaaaaaatggggattcaacttgagcagaaagttcatctgacaggagcggtatcatgacacgggttcgcattgagaaaggcgccggcggctggggcggcccgcttgaactggacgttacgccagacaaaaagatcgtctatatcacagccggtacgcgcccggcgatcgtcgacaaactggcgcaactaacaggctggcaagcggtggacggctttaaagaaggcgaaccgccggaagcggagatcggcgcggccattatcgactgcggcggtacgctgcgctgcggtatctatccgaaacgccggattccaaccattaatattcactcgacgggtaagtccggcccactggcgcagtatattgttgaggatatttatgtctccggcgtaaaagaagaaaacattactcttgtcggcgaaacgcctgccagtccccagcctgccaaaacgacattaggacgtgactacgacaccagcaaaaaaatcaccgagcagagcgacgggctgctggcaaaagtcggtatgggaatgggctccgccgtggcggtactgttccagtccggtcgcgacaccattgatacggtcctgaaaacaatcctgccgtttatggcgttcgtttcggcgctgatcggcatcattatggcctcaggtcttggcgactggatcgcccacggcctggcgccattagccagccatccactggggctggtgacgctggcattgatctgctcgttcccgctgctgtcgccctttctcggccctggcgcggttatcgctcaggtcattggcgtcctgatcggcgttcagataggcctgggcaatatccccccgcatctggcgcttcccgccctgttcgcgattaacgcgcaggcggcctgcgactttatcccggtcggcctgtcgctggcggaagcgaaacaagacaccgttcgcgtcggcgtaccttctgtgctggtcggacgcttcctgactggcgcgcccacggtacttatcgcctggtttgtttccggctttatctatcaataagaggttcagacatgagcgtgatttatcaaaccaccatcacccgtatcggccagagcgcgaaggaagcgctcggcgaacagatgctgattacgtttcgggaaggcgcgccggcggatatcgaagaattttgcttcatccattgtcatggcgaactgaccggcgcgctgcagcctggcgcgcggtgtgaattgggtcaacattgctatccggtcacggcggtcggcagcgtagccgagcaaaacctgcgtgaactggggcatatcactttgcgcttcgatggtctgcgtgaagcggaatttcccggcaccgtacacgttgcggggcctgtaccggacgatatcgcgccgggctgtattttgacgtttgtcgcttaaggagaaaaaacatgaatcaagttgccgttgtcattggcggaggccagaccctgggggcattcctttgccgtgggcttgcagaagaaggataccgcgtggcggtcgttgatattcaaagcgataaagccgcgaatgtcgcccaggaaattaacgccgattttggcgaaggtatggcgtacggttttggcgccgacgccaccagcgagcagagcgtgctggcgctttcccgcggcgtagacgagattttcgggcgcgtcgatctgctggtttacagcgcgggtatcgccaaagcggcgtttatcagcgatttccagttgggcgattttgaccgctcgctacaggtgaatctggtgggctatttcctctgcgcccgtgagttttcccgcctgatgatccgcgacggcattcaggggcgcattattcagattaactctaaatccggcaaagtgggcagtaaacacaactccggctacagcgcggcgaaattcggcggcgtggggttaacccagtctctggcgctggatctggcggaatacggcattaccgtacactcgttgatgctcggcaacctgttgaaatcgccgatgttccagtcactgctgccgcaatacgccactaaactgggcattaagcccgatgaggtggaacagtattacattgataaagtaccgctcaaacgcgggtgtgattatcaggatgtgctgaacatgctgttattttatgccagcccgaaagcgtcttattgcaccgggcagtcgatcaacgtaaccggcggtcaagtgatgttctgaccgtgaattgccggatggcgccgtaggccggataagacggttacgcgccatcaggcaaaacaacaggagcacattatggtttccactctgattaccgtcgccgttatcgcctggtgtgcgcagctggcgctgggcggctggcagatttcccgctttaatcgggctttcgataaacttagccaacaggggcgggtcggcgtcgggcgctccggcgggcgttttaagccccgggtggtggttgccgtggcgctggacgaacagcagcgggtgacggacactttattgatgaaaggccttacggtattcgccagaccggttaaaattgccgcaatgcaaggaaaacatttgcatgaattacagcctgatgtgatctttccccatgattcgctcgcgcagaatgcactatcattggcgcttaaactgaaacatgggtaatttcgttgtgaatgcgtatagcttgcgaaattatcattttgcaaccaataccctaaataattcgagttgcaggaaggcggcgacgcagcgaatcccaggagcgtacatcagtacgtgaccggggtgagcgaggaaagccaacgcacatgcagcgtgaagtatgacgggtaaatacataagtcagggtaatcacgcctatgaaacctcgtcagcgtcaggccgcgattctggagcacctgcaaaaacagggaaaatgctcggttgaagaactggcccagtactttgacacgacaggcaccactatccgtaaagatctggtcattctggaaaatgccggaaccgtcatccgcacctatggcggcgtggtgttgaataaagaagagtccgatccgcctattgatcacaaaacgcttatcaacacccacaaaaaagcgctgatagccgcagccgctgtgaaatatatccatgatggcgattccattattctggacgccggaagtaccgtgttacagatggtgccgttgctttcgcgttttagcaacatcacggtgatgaccaacagcctccatattgttaacgcgctatcggaactggacaacgaacaaactatcctgatgcccggcggcaccttccgtaaaaaatcggcgtcgtttcacggtcaactggcggaaaacgcctttgagcaattcagctttgataaacttttcatgggaactgacggtattgacctgaatgtcggtgtgaccacgttcaatgaggtttacaccgtcagtaacgcaatgtgcaatgcagcacgcgaggtgattctgatggcggactcctcaaaatttggtcgtaaaagccccaatgtggtgtgcagtctggaaaccgtcgacaaactgatcacggacgcggggatcgatccggcatttcgtcaggcgctggaagcaaaagggattgaagtaatcataaccggagaaagcaatgagtgatgcactactaaacgcgggccgtcagaccttaatgctggagctacaggaagccagccgtctgccggagcgtctgggcgatgattttgtccgcgccgccaatatcattattcactgtgaaggcaaagtgatcgtttccggtattggtaaatcaggtcatattggtaaaaaaatcgccgcgacgcttgccagtaccggtactcccgctttttttgttcatccggcggaagcactgcatggcgatctggggatgattgaaagccgcgacgtgatgttatttatctcctattccggcggcgcaaaagaactcgacctcatcatcccgcgtctggaagataaatccgtcgcgctgctggcgatgaccggtaaacttcactctccgctggggcgagcggcaaaagccgttctggatatttccgtcgagcgtgaagcctgcccgatgcatctggcgccgacatccagtaccgtcaatacgctgatgatgggcgatgcgctggcgatggcggtcatgcaggcgcgcggttttaacgaagaagatttcgcccgttcgcatccggctggcgcactgggcgcgcgtttgctcaataatgtgcatcacctgatgcgccagggcgatgcaataccgcaggtgatgcttgccaccagcgtgatggatgccatgctggaacttagccgtaccgggctggggctggtggcggtttgcgatgagcaacatgttgtgaaaggcgtctttaccgacggcgacctgcgtcgctggctggtgggcggcggcgcgctcaccacgccggtaagcgaagccatgacgcccaacggtattacgctccaggcgaaaagccgcgccattgacgccaaagagctcctgatgaaacgcaaaattaccgccgcgccagtggtcgatgaaaacggcaaactcaccggcgccattaacctgcaggatttctaccaggcggggattatctaatccttcagtcccagacgcttcgccagccgatgcaggttggcgacgtcggtttccagcgcccgcgcgctggccgcccagttatgattattttgcgccagcgcctggcgaatcatctctcgctggaagttctccgtcgattcgcgcaaattgcggcaagtcggcagcgccagaaagctttccgcaggcggcgcgggtaaaacgtcctctgacaaggcaaaatgctgtgcctccagtatcacctcatcccctgcccgggtcgctctcgccagtacaaccgcacggtgaatggcatgttccagctcccggacgttgcccggccagccatagttgagcaaatggcgacgtgcgccgggactcagtaccacgcgggacagccccagccgcagtcggcactgctcgcaaaaatagcccgccagcagcaccacatcatcgccgcgctcgcgcagcggcggcacaaagagcgggaaaacgctcaggcgatggaacagatcggcgcgaaaacgccctgccagcacctcttcacgcaggtcacggttggtcgccgccaacacccgcacgtccacgcgcaggctacgatcgtcgccgacgcgctgaatatcgccatactgcaacacgcgaagtagcttagcctgtagcgccagcgacagttcgccaatctcatccagaaacagcgtaccgttatccgccatttcgaacttaccgctacgattactgatagccccggtaaaagccccttttacatgaccaaacaactcgctctccgccacgctttccggcagcgcggcgcagttgagatagaccagcggattaaccgctctgggggagccctggtgaatagctttcgccaccagctctttaccggtccccgtttcaccgccgatcagcacgttaagatcggagcccgccacaatctcgatctcttttttcaactgcgtcatcgccggcgacaggccgatcatgtgcgtctcttttatcggttcaaacacgcctgacgaccccggcagcatgttctggctttccagttgttcaattaacagcgcattactcaatgccccggcggccagcgcggcgacaagccgtagttcttcatcgctaaatacctcgaactgctccggcgtcatagcatcaagggtcagcgcaccgatgaggttctgtccggcaaacagcggcagaccaacacaggcgtggactttcaggctttcctgtccgggaattaacccgtcatacggatcgggtaaatcgctatcagccggaaaacgcaccacgtcccccgcgcgggcgatggcttccaggcgcggatgcccttccagggtaaaacgtctgccgaggacgtcctgcgccaggccatcaatcgccagtggaataaattgtcgtgattcatagcgcagcagcgccgaggcgtcgcacgccagcacctgacgcagcgtagtaatcagccgctgaaaacgatcctgatgcccaatgccgcgttgtaactcaatggcgatgcccgccaatacctccacggaaaaactcatggttacctcattgtcattttgacaacctatagtgtcatattgacagcatcatttatagtctttttgactacatcaaaaatacaaaacaaatataactcaatacaaatcaataagatgaaaagttggcacactagctgcaataagcaaaacaactttttgtaaacgttgaatgaattgaggtggttatgtctattctggttaaaaataatattcattgggttggccagcgcgactgggaagtacgtgattttcacggcactgaatacaaaacgctgcgcggcagcagctataacagctatctcattcgtgaagaaaagaatgtgctgatcgataccgtcgatcataagtttagccgtgagtttgtgcaaaacctgcgcagtgaaatcgacctcgcggatatcgactacatcatcattaaccatgccgaagaagaccatgcaggtgcgctgaccgaactgatggcgcatatcccggacacgcctatctactgtaccgccaacgccattgactctatcaacggccatcaccatcacccggaatggaattttaaggtggtgaaaaccggcgatacgctggatatcggcaacggcaagcagttgatcttcgtggaaacgccgatgctgcactggccggacagcatgatgacctatatgaccggcgacgcggtgttattcagcaacgacgcctttggtcagcactactgcgacgagcgcctgttcaatgatgaagtggaccaaactgaactgtttgaacaatgccagcgctactacgccaatatcctgacgccgttcagccgtctggtaacgccaaaaattaccgaaatcctcggcttcaacctgccggtggatatgattgccacctcacacggcgtggtatggcgcgacaacccaacgcaaatcgtggaactgtatctgaaatgggcgacagattatcaggaagatcgtatcactattttctacgataccatgtcgaacaatactcgcatgatggcggatgccatcgcgcagggtatcaacgaagtggaccccaacgtggcggtcaaaatctttaacgtcgcccgcagcgataaaaatgaaatattgaccaacgtcttccgttcgaaaggcgtgctggtcggcacttctaccatgaacaacgtgatgatgccgaaaatcgctggtctggtggaagagatgaccggcctgcgctttcgcaacaaacgcgccagcgccttcggttctcatggctggagcggcggcgcggtggatcgactgtccacgcgcttacaggatgccggttttgaaatgtccctgagtctgaaagcgaaatggcgtccggatctggatgcgctggagttgtgccgtcagcacggtcgcgacatcgcgcgtcagtgggcgcttgctccgctgccggaaaccacacagcaaatcgcgccagtcgaagaaaccataacctgcaccgccgcagacctcggccccaaaatgcaatgcagcgtatgccagtggatttacgaccctgcgctgggcgagccgttgcaggatgtcgcgccgggtacgccgtggaacgacgtgccggataacttcctgtgcccggaatgttcattaggtaaagacgtgttcgacgtactggcgacggaggcaaaatgagtcgggggatcatcattattgggtcgggcttcgccgcccgtcagctcgtcaaaaatattcgtaaacaagatgcgcatgtgccgttaaccctgattgcggcggacagcatggatgagtacaacaagcccgatctcagccacgttatcagccagtcgcagcgcgccgatgatctcacccgccagttagcgggggaatttgctgaacagtttaatctgcgacggttcccgcatacctgggttgctgacattgatgccgatgcccatgtggtgaaaagtcaggataagcagtggcagtacgacaagctggtactggcgaccggagcgacagcctttgtgccgccgattgcaggacgtgagttaatgcttactttgaatagccagcaggagtaccgcgcctgtgagacacaactgcgcgacgcgcagcgagtgctgattgtcggcggcggtctcattggcagtgaattagcgatggatttctgccgcgccgggaaaacggtaacgctgatggataacgccgccagccttctcgcctcactgatgccaccggaagtgagcagtcgcttacagcatcacctgaccgatatgggggtgcatctgctgctgaaatcgcagttgcaaaaactggagaaaaccgaagccggtatccgcgctacgctggtaagccagcatagtattgaggtcgatgcggtgattgccgccaccggcttacgcccggaaaccgctctggcgcgccgcgccggagtagccgtcaaccgcggcgtctgcgtggatagctatctacagaccagtcacccggatatttatgcgatcggcgattgcgcggagatcaacggtcaggtgctgcccttcctgcaaccgatccagttaagcgcgatgtacctggcgaaaaatctgctcggcggcaacgcgccgctgaagctaccggcgatgctggtcaaagtcaaaacgccggaactgccgctgcatctggcgggagaaactcagcgccgcgatttgagctggcatattaccgcagaatctgacggtatgattgccaaaggcatgagcggagaaggccaactacgcgcctttgtggtgagtgaagaccgcatgaaagaggcctttgcactgctaaaaacgttgtcggtataagcctgtgatgccggatggcgccgcttcgcgtcttatccggcctacgagtgagcatctgtttacaggccggataaggcgcagccgccatccgtcgccctacacttcacttaacgctcgcgctgcggcaatcacgccctgtccaaacgacagcccgccgtcgcccgctggtaaccgctgcggaaataacaatttaaaatcagaaagataaaaggcaagacgcgcgcgaagtaagcggttgtgtatcaccccgccgctgaagaccagagtggttatcccccgcgccgtagcctgctggcgcattagcgtggcaaacccgcacgccagcgcatcatgaaaagcccaggcgcgttgcgcaggcgtggcctgccagttcaaccattgccgccagaaaacggcgacgtccagttgagcgccgttaagcggcatcgttaccggatgctcaacgttagcgcattgagaggccagcgcctccagcgcgcaggcggcctcgccctcatagctaagcgatgctggcgcgcagcgaagcgcggcagccaccgcgtcaaacaaccgcccgcaggaagaggccaacggggcattgacgccgcgctcaatggcgcgcgccaggacattccagttttgctgttgcagccccgctgtctccgggtaatcctgccagtccggcacaaagcgcaggcactgcgccaacagattacgccacggatgtttggcagccagatcgcctcccggcagcgccacggcgggtaaaccacctaaatgttcgcattcgcgataattgacccgcaaacattctccgccccatagcgcgccattctcacccatgccgataccgtctaccgtcagggcaatcacctctccgccgtccagcggccaaccatgctcggccaggcaagccgccgcatgggcatgatggtgtaacaccgtctctgtcggcagacgcatctcactggcccactgactggaaacatagcccggatgcgcatcacagacgatacgctctggcgtaaaatcgtagattgactggatcagacgcaatgcctcgcgccactgcgcctggataccgtcatcgctgagatcgcctaaatgttggctgacaaccgcctgtgcgccgcgtaccagacagaacgtgtttttcagatccgcgcccagacaaagtatcggcggcacatcgcgaaatccgggcggcaacgcaatcgcgtccggcacgtatccccgcgaacgacgcagcatttcgccgctgtcgcgtacgacagagtcgtccatgcgctgtacaatgtcgcgattgtgcaacagaaaaccatcggcaatatcgtgtaaatcgtccagcgcctgttcgttggtgatggcgggcggtttgccgctcaggttgccggatgtcatcaccagcgggtaattgagctcctgcaacaagaggtgttgcaatgggttggctggcagcatcacacccacctccgtaagtcctggcgcgatgccctcactcagcgaaggtacatactgcttatccaccagtacaatcggggccgctggcgtggtcagcagcgaacgcgccgcgctcggcagcgtttgcgccgtgggcaacatcaccgccaatggtttcgccggacgatgtttacgcgcccgcagcatcgccactgcgttagcgttgcgcgcatcgcaggccagatgaaaaccacccagccctttaacggcaataatgcctccggcgttcagttgggcgaccgccgcctgcaaagccgcctctttttccgctcgttcatgttggctccgccactcaagatgcggcccgcatgacggacaggcaacgggctgggcatgaaaacggcgatcgtacggatcgcggtattcgctgtcgcattccggacacaagggaaacgccgccatcaccgtaaatggccggtcatagggcatagcgcgaataatggtgaagcgtggtccgcagtgggtgcaattgatgaaaggataacggtagcgccgctcgcctggggtattcatctcggcaagacatgccgggcaggtcgccgcatccggcacgatttgcgtgttcatcgaaccgcctgcgctctgacgaatggtgaaatccgtcggcgcgcgctcccataccaacgacgcgtgttcaacgctgtcaatgcgcgccagcggcgggcaatcctgatagagcgcggcaataaattgcgacggctcttccagcagccgaacgacgacgccgtcgccgtcattacacacgtcgccgtgtaatcgcaactgctgcgccagctgccagacaaaaggacgaaaaccgacgccctgtactttgccccgaatgcgtagctgtacgccggaaggtgtgtctatcgccatcttattttcccgccatcatcgaacccggatgcctgatggcgcgacgcttatcaggcctacaaccgcacggaccgtagaccggataaggcattgatgccgccatccggcaatgctttgtggcgtattctacgcgcaatcgcagaaatcagaaaagcagcgatgccgttgaatccagcgccgcgcgacggcgtttttccgcgctcagctgttcaagcttattgcggtccacgcagattagggcgtgcgttgggcaagcggccatacaggccggaccggcttcacggtggtgacacagatcgcacttgttggcttcggctttttcggcacgcacgttcagccccgcgccgctattgcgaaccaccggacgtaccaccacttccatggcgccgtaaggacatgccactacgcaagttttacagccaatgcagcgttcctgcatcacatgaacaaagcctttgtcacggctgatggcgccattcgggcaaacgttggcgcacggcgcgtcttcacactggcgacacagcgttgccgtggaaacgttcacgcctttgatgacatggatacgaggtaaaaaggtttcaggggtcagcgatgcgcaatcctgattttcctgatgggatacgacgcaagccacttcacaggtacggcaaccaatgcacttactcgcgtctgcaatgatgaaacggttcatcaaattctccagcaataacagatgatgtgccgatatatacacgaatcgtgccaatttttatttcattgttatttaagaatattatttctattttcgtgagcatttacgtgtcatcgtcacaagtgtcgatgacacgtaatgtcgccagtggtggtcaagatttgcagtgatagccagccaactctgcaccgcaactggcatcaatcctgattaacgcctggcaatacgttaccgcgtattaaacagcgctgcgtaagggaaagatcgtccgtttgcggattccttccggcaataggtttgataattaatttacgaccaggatagtgattaaaacgggtcagcgccggataactcaaccggccaaaccagccgtgtacgcgctgccagcgggcgtccttcacctgatataaattggttatccagtagcctgagtcaaattgcatatccaacagttgcgtgcgcccattgccctgtaaatcaagcaaatcatcaacgccagtatcggtcgcggtataaaacccccacggttcaaagacgcaggggcggccattcttgagaaaggtgaaaatgatgtattgcgcgctcggcgccaggcccaacccaggattgcccaaccagataaccagatcctgaatgccgttacgatcgaggtcagcgcgataaaattgcgcattacccgccaaattaatcagccttccaaccgggacaacccacgaattaccggctctgtcttttccgctaatccgccattcgttatcttttttcggctccggcagtagcgtcacgccactgactccgacctggcgaaagtgccaggtctggtcgggcgatacagaataaggcagggtcaacagcggcttcagcgcacgcttttgcgcatattcaccgtcgctcatcggcaggtaaccgacaacaccggcggccagtgcgcgtgcggcgaggcagagaaatagcagtccgctccatacgataatcttcacgtccttcttacaacctttgccgtgtaacacaaattctccctaaatatgtgcgcattttacgcctccggcgcttccagcgcggcaaatccgccgtttccctgccagccttccaggcgctgatagacgatgtttaccgcgtccttaatcggttgagtcatcggataataaaacccgacgatatccggctggataccaacaaaaatcacctccccgacatcctctttcagctgatcgataaggtagttgagcggcatattgtgggtggtcatcataaacatttcggcgatatcatccggatagatgatgcggatctcgcccggattaagtcccatatcggtggcgtcgacaatcaacagacgctgcgggcgcagttcgcgaatcgccacaatgtcgttttccggcgcgctgccgccatcgatgacaacccagttgcccttcggctgcgccgcgcacatttccgccagtaacgggcctgcgccgtcgtcgcccatcatgctgttgccgacacagagtaaaacgtcagtcacgaagcctcctcaccatcagatagatggcgctttcctgatgaatgtcatacagcatactgagcatcagtttgctccattcttgctgctgcggggtctgcgcggcgcgcgcctcatcaaacgcgcgcgccagcatttgaacatggttgaaatcgatgacgatctcgccatacttcggcacgccttccattttacgccgggcatcgctaccggcttccagggtggcgatccacgccagatactcatcccatgggcaggtgagtgcggcctccagacaatcgataacccccaggtggtgaccaatcgccaggctgtaatagacaacctgctgcgcctcggcaggcgtcgcatcgttctcatcaataaacttacggctcagttgactgaacaccacctgttcgctcatcggatacgcgcctcttcaacaacatgattgagatgggtgacaatttcggttaaacgcggatcgttttccgcttccagccaacgcgccacttgctgctcgccctgccccaactgtgtcaggtaatcatcggcgatctgacgaccatagcgataacccgccagccggcgcgccgcgcgatccaccttcacgcgcagcggctgcaccatatccggatgcaggatctctgcgggctgatcgtccagctcacccggcgcgcgggcgtggattttctgctccagcaggccaagcgccattgcaaatccgtacagcgtggcggcaggcgttggcgggcaccccggaatgtacacatccaccgggacgattttgtcggtaccgccccagacgcagtagagatcatggaagatgccgccgctgttgccgcaggcgccgtaagagatacaaattttcgggtccggcgccgactgccaggcgcgcagcgccggagagcgcatggcgcgggtcaccgcgccggtaaacagcagaatatcggcatgacgcggcgacggtactactttgatgccgaaacgctcggcatcaaacagcggcgaaagcgtcgcaaagatttcgatttcacagccgttacagccgccgcagtccacgcggtaaacgtatgccgaacgcttaatatttttcagtaaagacgccttcatgctggcgatggattcatccaccgtcatcggtaccggaatgccgttggcgtcacgcgggcctaataaattgctcattagctgacctctttcatatggcgagtcagttcaatacggtcggacggcaccaggcatttctgacgcttacagtccgggcaggtctcaaagctttcgcggtggttttccgcgcggctgtcgccgttgtgcgcaagcagcgcaatggcgtagtcgatctctttctgtaccgcgaaaggacgattgcacacgcggcagttgcacagcgcaaagcgggactgttgcaggaaatcttctttcttccacaccgccagttcgtactcttgcgacagtttaatcgccgccgtcgggcacacctcttcgcagcgaccgcagaagatacaacggccaagattgaactgccacgccagctcattggtcgcgagatcggtttccaccgtcagcgcgttcgacgggcaggcattaacgcaggcggcgcagccgatgcactgctgcggattatgttccggcttgccgcggaagtttttatcaaccgcaatcggctccagcggataagacgaggtcgccgtgccggttttgataacttttttgataaaggtaaacatggcgattccttatttcagcggcgagtttttacgctcaatgctgtagcgctcaagttctttgtacggcacgactttgctcttcttcttacgcacatcgaccacggtcatccggtcggtacaggagtagcacgggtcgaggctgccgataatcagcggcgcgtcggagacggtgttgccgcgcagcatatagcgcagcgtcggccagttggcgtaggtcgccgcacggcagcgccagcggtacagcttctggttgtcgccggtcatgctccagtggatatcgtcaccacgcggcgcttcagcgaagccgagcgcaaaacggtgcggaatataggtaaagccttccaccatcagcgggccgcccggcagattatccagaccgaaatcgatcatattcagcgaggtgtaaacttcgttgatacggactttcagacgagaaatcacatcgcagccctgctcgctgtgcacttccatcggcagcaggccatagcccacaaacgggtggtcggcgcgggtgtcgcgggcgtgaccgctggcgcgcaccatcgggccgacattactgaagtcacgggcaatttccgggtccagacggccgatacccacggtacgctgttccatattcggcgtgctcagcagcatgtccaccagctcctgcacgtcacgacgcatctgctgcgccagttgacgggtctggatcatgtcctctttgagcagatcgcggcgaatcccgccgatcaggttcagtccgtaagttttgcgcgcgccggtaaggatctctgccattttcatggaggtttcacgcacgcggaagaactgcataaagccggagtcaaaaccggtaaagtggcaggcgaggcctaggttcagcaggtgcgagtgcagacgctccacttccagcagaatggcgcggatcatctgcccacgctccggcacctgaatgcccatcgcgttttccacggaagtggtgtaggcagtgctgtgcgcgaagccgcagataccacacacgcgatccgacaggaaggtgacttcgttataacccatgcgggtttccgccagtttttccataccacggtggacgtagaacaggcggtagtcggcgtcgataatgttttcgccatcgacgaacagacggaagtggcccggttcatcggaggtgacatgcagcgggccaatcggcaccacgttatttttcttgtcacccagctcgttaatgaactcgtaggtttccgcatcggtggtcggcgccgggcgctgacgataatccatactgtctttacgcagcggatagagttcatccggccagtcgtccggcagcaccagacggcgctcgtccggcagaccgaccgggattaaaccgtacatgtcgcgtacttcgcgctcaccccacacggcagccggcacgcgcggcgtaacggatgggaattccagcttattggcatccacttcaacgcgaacggtaatccagcacttcgtgccctgctccatcgacagcacgtaataaacggcatagtggccgcacaactggcgttcgtcattaccgaacagcaccgacagccacccaccctgctggtagtaaagaaactccaccacttccggcagatagtttactttcaccgtaatagtcagctgatctttggtctgccaggcttcgtccagcacgacgcccggaaacgcctggtgcagcgccgcaaggtattgttgacctaatttttcttcagacatgctcaaactctcttaaatcacgccgccagcaaggagacgaaggctaaaaacgcaaacccaaaaccggcccaggtcacgcgtgaagtggcgcaaaaacgcagtcgcgccatgctgttttcaaacagggcgatcaccagtacgccaacaatcagcttgacgacggcaatcaccagcgccagcagcagtccgcctgcgctgaaggtttccatctgtccccacggcagaaacacgccgacgaacatttgcaacaccaccagttgtttaaggctgatgccccatttcaacaccgcaaagccgctaccgctgtattcggtcaacggcccttcctgcaactcctgctccgcttccgccaggtcgaacggcagcttgcccatttcgataaaggtggcgaaggcgcaggcgcacagcgccagaatcagcggaatactgcgcgcgacaggccagtgataaatggtatcggcgatattgctgatatgagttgaacccgccacctgcgcggcgacccacagacccagcagcagaatcggctccaccagcacgccgagcatcgcttcacggctggcgccgatcgcggtgaacgggctgccggtatccaggcctgcaatagagaagaagaagcgcgcgatggcgaacaggtaaatcagggtgattaaatcacccagttgcggcaacggagatccaacggtgacgaccggcagcgcggtggcgatagtcagcatcacgccgaccatcacaaacggcgtcaggcgaaaaacccagccagaatcagcgggcgcaatactctgacgaccgagcagtttgataatgtcgcggtactcctgcaacacgcccggccctcggcgattgtgtagacgggcgcgcaccacgcgagtaataccggacagcaatggcgcaacggcaaatagcaccagcgcctgaattaacggataaaacacactcattttcaggctcctcgtgaaaccacaatcaccaccagcaccgccagctcaatcagcgccagacgacggaacagcaccgcggccgccgcgttctgccagcccggaatcaacgataccgggttgagccacttacgcagtttgagtaccggggcaaaggcctctttcaccggcatggcaaaaccgtgcgcggtaatcaccatcgactgctcatggtcgtagccgcacacccaggccgcgccgcgagaacgcgacggcagacggttgcctttgaacatcgccataatgatgaacggcagtagcggacaggcgaccaacagcagcgtgatcatcggctgcgatacggtggtgtgcgcggtttccagcggcaacggtaccgcagtggaaatcatcggcaacagccacggcgcggcaaccccgcccagtacacagcaaatcgccaatgccaccacgctgacgcccatcaggatcggcgcgcagctggcattttcagcttccttcgtgcgcggcgcgccaaggaacgtcacgccatacactttcgccatacacatcaccgccagcgcgccggtaatcgccaggccaaccgccagcagcggtcctaacagacgaccaacaaacgcaccgctgttgcccagtttgaagaaggactgataaatcacccactcgccggcaaagccgttcagcggcggcagcgccgccatcgccatcagaccgaccagcatggcgatagaaataaccggcatccgtttaccaataccgcccagtttttcgatatcgcgatgaccggtacggaaccagatgctgcccgcgcccagaaacagcacgcttttgaacaggctatggttcagcaggtgatagagcccgccggtcagacccagcgcgatcagtaccggctgattgagagcaatcccggtaacgcctgcgcccagaccgagcaaaatgatgccgatattttccagcgtgtgataggccaacaggcgctgaatgttatgctccatcagcgcgtacagaccgccgacaaaggcggtgatcatccctagcaccaacagcgccacgccccaccacagcggcgcattgccgccaagcagagatagcgtgaggatacccagcaacccgattttcatcaccacggtcgagaacagcgcggcggcgggagcgctggcgttggcgtgcgcctgcggcacccaaccgtgtagcgggataatcccggccagcagaccaaaaccgataacgccgagcagccagatatcggagcccagcggcagttgctgagcgcgttgatccagcagccccagatccagcgtgccgtagcgctgccacaccagccaacaggcgattgccagcagcagcgtaccgagacggcccagcgcaaaccacagtttgccctctttgctaccgccggtgaggaacacggcgcagagcgccatgatttccgccatcaccaccatcgtccccagattactggcgaccacggcgcagacggctgccgccatcagcaggttgattaacagcccgttggcttttacctgtggatggcgatgccagtcgatattgaacaggctgacgaacagaccgcacagccccagcgtaatcagccagatagcattcagcggcgtaatttgcagcatgtggccggtaaacggcatcacgccgctaaccgtaacggcgctggtcagcgcggtgaaccccgcgcctgccgtacacaggctgccgaccgcgccgccgataccggcaatccagccgctcagcgctttatgaaacgaaaacagaaacgccagaacggcggcggcggcaaaccacgcgacgccgctagtaatcagtgaaagtgaactcattatgcatccccactctgagcctgctgaaacaaggtgagatcgccaaaatcggtattaaacgtcagctcacgtttacgtttgctggcgcgggcgatatccgtgttctccaccaggtgtagcgctttagtcgggcacatccgcacacaggccgggccttgctcgtcaaagctgcacaggtcgcatttcaccgcgatagcgcgtacgcccggcacccagtcgagcaacgtactgacgcgcgcaggcgctggcggcgcgggcggcgctttcggcgtattggcgttcgccggaatatgcagcggacggctgccggaaaactcaatagcgccaaacggacaggcaataccacacagtttgcagctcacgcacaggctttcattaagctggacagcgccgtcaacgcgattaatcgcgttaaccgggcataccgtggcgcatggcgcatcttcacagtggtgacaaagctgcggcgcagattctttttcattcagcatcactttcaggcgcggcattgactgcaggccatgctggcgatgcgtctctgaacaggcggcctcacaggtgtggcagccgatacagagagtggagtcagcaattacaaaacgattcaccaggcattcctcaggtgattgtcatttttgacgaaaacatgccgttgaaatgtcattttcgacacttatcgacacgcccatccccaaaacattcatgacatggcgcaacgccacatcgcgaatcaaagcgggcaacgcctcaggcttataccgccgggctgtgtccctttaccaattgacgcaaattaaccggcgagttggtttctacagcggtatagaggctgtcgtaaacgctggcgattttttccagatagtgctccagcacctgctcgcgatcgcggttgttaacccgttcatcaaccttgccgtcgatatcgagctgcgcctgtgcaatcaattgtttatcttcgccatctttggtttcaacgtagtactcaatggtgtggctgttaaaaccatccgccaacgcgacgtaaatacgaaagtgctcaaacaggacaaagcaaagatccctttccggcgcgcagctcattgcgtgatgcaggcgcgctttcgagagggtgatcccctgaaccagcgagttgcagtaaatatgccactggtcctgtaggcgacgatgccgttgcgcgatgtaatcggccttttcgcttatttcccaaatagtcatgtcaggttacccgtttaacagagatgcctgcgttaagcattttccatgccaatttttaacttattgtttttaatggcagacgcgcacagttactgccgtttcgacgcggtgacgacatgtcatttcgtcatcgtcgacattaacctgccaggggataaaaatattggcataaatattgctttacaggggcaaccactacgggaggcgatatgcacgaaatcaccctctgccaacgggcactggaattgattgaacaacaggcttcagcatacggtgcaaaacgtgtgacagccgtctggatcaaaattggcgcattttcttgcgtggaaaccagcgctctttccttttgttttgatctggtatgccgcggcacgatagcagaaggttgtaaactgcacctcgaagaacaggaagccgaatgctggtgtgagcattgtcaacaatatgtcacgttgttaacccaccgtgtacgtcgttgtccgcaatgtcatagcgatacgctgcgaattgtggccgatgacggcttacaaattcggcgcatagagattgatgaaactgaagattaatgccggatagacgctcgcgtcgccatccggcagaaagcctgtaacaagaaaaagatcaggagtaagcgatgtgtacgacttgcggttgcgctgaaggcaacctttatatagaaggcgatgaacataatccgcactcagcgtttcgtagcgcgccctttgccccagcggctcgcccggcgctgaatattaccggcattaaaacgcctgactttgccccaagtcagaccgcagaaggcgatctgcattacggccacggcgaagccggaacccacgcgcctggtatgagtcagcggcggatgcttgaggttgaaatcgacgtgctggacaaaaataatcgtctggctgagcgcaaccgcgcccgtttcgccgcccgccagcaactggtgctcaacctggtgtccagccccgggtccggtaaaaccaccttgctgactgaaacgctgatgaaattgaaagaccgtgtaccgtgcgcggtgattgaaggcgaccagcagacagtgaacgacgccgcccgcatccgcgctaccggcacgcccgccattcaggtcaacaccggtaaaggctgccatcttgacgcgcaaatgatcgccgacgccgcgccgcgcctgccgctggatgaccatggtattctgtttatcgaaaacgtcggtaatcttgtctgcccggccagcttcgatctgggcgaaaagcataaagtcgcagtgctttccgtgaccgaaggtgaagataagccgctgaaatatccccatatgtttgccgctgcgtcgctcatgctgctcaataaagtcgatctgctgccctacctcaattttgacgttgagaagtgcatcgccagcgcgcgtgaagtgaacccggagattgaaattatcctgatttccgccaccagcggcgaaggcatggatcagtggctggcctggctggaggcgcagcgatgtgcataggcgttccgggtcaaatccgcgccattgacggcaatcaggcaaaagttgacgtctgcggcattcagcgcgacgtcgatctcacattagtcggcagttgtgatgaaaacggtcagccgcgtctgggtcagtgggtgctggtccatgtcggattcgccatgagcgtcattaacgaagcggaagcgcgcgacacgctcgacgcgctacaaaatatgtttgatgttgagccggacgtcggcgcactgctgtatggtgaggagagataatgcgttttgttgacgagtaccgtgcgccggaacaggtaatgcagctcattgaacacctgcgtgaacgcgccgcccttcttccttacactgccgaacgaccgctgcgcattatggaagtctgcgggggtcatacccacgcgatttttaaatttggtctcgatcagttactgcccgaaaacgtggagtttattcacggccccggttgtccggtctgcgtgctgccaatgggacgcatcgacagttgcgtggaaatcgccagccatccggaggtgattttctgcacctttggcgatgccatgcgcgtgccggggaaacagggttctctgttgcaggctaaagcgcgcggcgcggatgtgcgtattgtttattctccgatggacgcgctgaagctggcgcaggataacccgacccgcaaagtggtatttttcgggctgggctttgaaaccaccatgccgaccaccgccatcacgctgcagcaggcaaaacagcgtgacgtgcgaaacttctactttttttgccagcacattacgctgatcccgacgctgcgtagcctactggagcagccggacaacggcattgacgcctttcttgcgccaggccacgtcagcatggtcatcggcaccgaggcgtaccagtttatcgccgccgattttcatcgcccgctggtggtggctggattcgaaccgcttgatctactgcaaggcgtggtcatgctggttgagcagaaaatagcggccctaagccaggttgaaaatcaataccgtcgcgtggtgccggatgccggaaacatgctggcgcagcaggccattgccgatgtgttctgcgttaatggcgatagcgagtggcgcggtctgggcgtgattgaatcctccggcgtccacctgacgccggagtatcagcgctttgacgccgaagcgcatttccgcccagcgccgcagcaggtctatgacgatccgcgcgcccgctgcggcgaagtgctgaccggcagatgcaagccgcatcagtgcccgctatttggtaaaacatgtaatccagagaccgcgttcggcgcgctgatggtctcttccgaaggcgcatgcgccgcctggtatcagtatcgtcagcaggagtgtgaagtttgaacaatatacaactcgcccacggcagcggcggccaggctatgcaacagttgattaatagcctgtttatggaggcctttgccaacccgtggctggcggaacaagaagatcaggcgcgtctggagctggcgcagctgacggcggagggcgaccgtctggcgttttctaccgatagctatgtgatcgatccgctctttttccccggcggcaatatcggcaaactggcgatttgcggtacggcgaacgacgttgcggtgagcggcgcgatcccccgctatctctcctgcggctttatccttgaagaagggctgccgatggagacgttaaaaagcgtggtcaatagcatggcggcgaccgcgcgggaagcggatatcgccattgtaaccggcgacaccaaagttgtgcagcgcggcgcggcggataaattatttatcaacactgccggcatgggggcgattcccgccgatattcgctggggcgcgcaaacgctgagcgttggcgatgtgctgttagtcagcggtacgcttggcgatcacggcgccactatcctcaacctgcgtgagcaactgggactggatggcgagctggcgagcgactgcgcagtattaacgccgcttattcagacgctgcgtcatattgacggagtgaaggcattgcgtgacgccacgcgcggcggcgtgaatgcggtcgcccatgagtttgcggcgtcctgcggttacggtattgaattgtccgaatccgcactgccgctcaaacctgccgtgcgcggcgtctgcgagctgttggggctggatgccctgaactttgccaacgaaggaaaactggtgattgccgttgaacggcaggccgcagatcgggcgttggcggcattacgcgcgcatccgctgggacgtgatgcggcgctgattggcgaagtcgtggaacgcaaaggcgttcgcttagccggactctatggcgtgaagcgaacccttgatttgccacacgccgaaccattacctcgtatatgctagcagcctgttgacagcatactgtaagccggataagacgcatttgcgtcgacatccggcattaacgctgcatgaacgcctgatggcgctttgcttatcaggcctacggagtgtgtgaccagcgagtttgcggtcagccatccggcaataacttacgacttatacctataattcatttaccgttttcgcaccgttttgcggtattttcctggaaaagcaacatgtcgtatacacccatgagcgatcttggacagcaaggcttgttcgatatcactcgtaccttattgcagcagcccgatttggcgtcgctcagtgaagcgctttcgcaactggtaaagcgttcagcgctcgccgacagcgccggcattgtgctatggcaggcgcagtcgcaacgcgcacaatattatgcgacgcgagaaaatggccgtcctgttgaatatgaagatgaaaccgtactggcgcacggcccggtacgtcgcatcctttctcgccccgatgcattgcactgtaatttccatgagtttaccgaaacctggccgcagcttgccgcgagcggcctctaccctgaatttggtcattactgtctgcttcctttagccgcggagggccgtattttcggcggctgcgaattcatccgtcaggaagatcgcccctggagtgaaaaggaatatgaccgtctgcatacgtttacccaaattgtcggcgtggtcgccgagcaaattcaaaaccgggtaaacaataacgtcgattatgatctgttgtgccgcgaacgcgataacttccgtattctggttgcgattaccaacgccgtcctgtcgcgtctggatattgatgaactggtaagcgaagtcgcaaaagagattcaccactatttcaatatcgacgcgatcagcatcgtgttgcgcagccatcgcaaaaataagctgaatatctactccacccactaccttgatgagcatcatccggcgcacgaacagagcgaagtcgacgaagccggcacgctcacggagcgcgtctttaaaagtaaagagatgctgcttatcaacctcaacgaacgcgatccgcttgccccctacgaacgcatgctgttcgatacctggggcaatcagatccagacgctttgcctgctgccgttgatgtccggcaagacgatgcttggcgtgctcaaactggcccagtgcgaagaaaaagtgtttaccaccgccaacctcaagctgctgcgtcagattgccgaacgggtagccattgccgtggataatgcgctggcctatcaggaaatccaccgactgaaggaacgcctggtcgacgaaaacctggcgctcacggaacagcttaataacgtcgacagcgagtttggcgagatcatcggacgcagcgaagcgatgtacaacgtgctaaagcaggttgagatggtggcgcagagcgacagtaccgtgctgattctgggcgaaacgggaaccggtaaagagttgattgcccgcgccattcacaacctgagcggacgtagcgggcgcaggatggtaaagatgaactgcgccgcgatgccggcggggctgctggaaagcgatctgtttggtcatgagcgcggcgcgtttaccggcgccagcgcgcagcggattggccgtttcgagctggcggataaaagctcgctgtttctggatgaagtgggcgacatgccgctggagctacagcctaagctgctgcgcgtccttcaggagcaagagtttgaacgtctcggcagcaataaactgatccagaccgacgtgcggctgatcgccgcgactaaccgcgatctgaaaaaaatggtcgccgatcgcgaattccgtaacgatctctactatcggctgaatgtttttccgatccagcttcctccgttgcgcgaacgtccggaagatattccactactggtcaaagcgttcactttcaaaatcgcccgccgaatggggcgtaatatcgacagcattcccgccgaaacgctgcgcacgcttagcagcatggaatggccggggaacgttcgcgagctggagaatgtcgtcgagcgcgccgtgctgctgacgcgcggcaatgtgctacaactgtcgctgccggatattaccgccgtaacgcccgatacctcgcctgttgcgactgaaagcgccaaagaaggcgaagatgaatatcagcttattatacgcgtgctgaaagagaccaatggcgtagtggctggaccaaaaggcgcggcgcagcgtctggggcttaaacgaaccaccctgctgtcgcgtatgaagcgattgggtattgataaagacgcgttagcgtaacgggttgccggatctgatccggcctggagatgatgcgcgccgtaggcctggcgcttccccttcacttcttgcgctgatatttttccggcaattccggaacggggcgcttatcgtcgataaggtgccgcacggtcaggacaggatgccgccaaagcattcgcggacctgcccaacgcataatctgcttcatctcctcgcgtttagccggctgatagcagtgcaccgggcactgcttacaggcgggtttttcctcgccaaatacgcatttatcaagacgtttttgcgcgtaggcgaacagcgcgtcgtaatgcccctgcaccgttgacgcctgtgggcactggctttcatacagcgcgatcatttttttgatcgtcagtttttcacgagcgatacgtttaccaggcatcgtgctctctccgaacattaaggtgtatttattttacaccttatccctctttagcactatcactgcatattgtcgccatttcgcaaataagaattattttcatttatccataccttgtgctatataacatagcaaaggctatattcgatgattaattaaccacattgttgcgagggatactatgacgaatctacatcgtctgaaaacactcctgattgccggtattgtcgcgatactcgcgctatcgccagcctatgcaaaagagaaatttaaagttatcaccacgtttaccgttattgccgacatggcgaaaaacgtggcgggcgacgcagcggaagtcagctcgattaccaaacccggcgctgaaatccatgagtatcagccaacgcccggcgatattaaacgagcgcagggggcacagcttatcctcgcgaatggtctgaacctggagcgatggttcgcccgcttttatcagcacctttccggcgtgccggaagtcgtcgtctccaccggcgtcaaaccgatgggcattaccgaaggcccgtataacggtaaaccgaacccgcacgcctggatgtcggcagaaaacgcgctgatttatgtcgataacattcgcgacgccctggtgaagtacgatccggataatgcgcagatctataagcaaaatgccgaacgctataaagcgaaaattcgccagatggccgatccgttgcgtgccgaactggaaaaaattcccgccgatcagcgctggttggtcaccagtgaaggcgcgttctcttacctggcgcgcgataacgacatgaaagagctttatctctggccaattaacgccgatcaacaggggacgccaaaacaggtgcgtaaagtgattgataccattaaaaagcaccatattcccgccatctttagcgagagtacggtttccgataaaccggcccgtcaggtcgcgcgtgaatccggcgcgcattatggcggcgtgctgtatgtcgattctctgagcgccgctgacggccctgtgccaacctatctggatctgctgcgcgtcacgaccgaaaccatcgtcaacggcattaacgacggactgaggagtcaacaatgagtcaatctgcgattaccgttgatcaagtcacggtgacgtatcgcaacggtcataccgccctacgggacgccacttttcaggtgcctggcggttcaatcgccgcgctggtaggcgtaaatggttccggtaagtctacgttatttaaagcgttaatgggctttgtgcatcttgcgcagggcgatatcactatcctgcaacagtcagtcaacaaggcactgaaaaaaaacctcattgcttatgttccgcaatcggaagaagtggactggtcatttccggtgctggtagaagatgtggtgatgatgggacgctacggccatatgggctggctacgccgtcccactgcgcatgatcacgcctgtgttgacgccgcgctggcgcgggtggatatgcaggagtatcgtcacaggcagattggcgagctgtccggcgggcagaaaaaacgtgtgtttcttgccagggccatcgctcaggatggacaggtgatcctgctggatgaaccttttaccggcgtggatgtaaaaaccgaagcgcgaatcatcgatctactgcgggaactgcgcgatgaaggccgcacgatgctggtctcaacgcataatctcggctccgtcaccgagttttgcgactatacggtaatgattaaaggaaccgtactggccagcggccctaccgaaaccacgtttaccgccgcgaatctggaacaggcgtttagcggcgttctacgtcatatcgcgttaagcggaggtgaagagcacatcatcaccgatgacgagcgcccctttatttcccggcgcgtggccagcggaggaaaatcgtcatgaactggcttgttgagccgtttggctaccagtatatgctcaacgcgatgtgggtctccgcgatggtgggcggtctgtgcgcgtttctctcctgctatttgatgctcaaaggctggtcgctcattggcgatgcgctatctcactctattgtgcctggcgtcgctggcgcctggatgttagggctgcccttctcgctcggcgcgtttctttccggcggactggcggcaggcagtatgctctttcttaaccaacgctcacgcctgaaagaagacgcgattatcgggcttatcttctcctctttttttggcgtcggcctttttatggtgtcgctcaatccgatgtcggtgaatatccagacgattattctcggcaacgtgctggcgatcgcaccagcggatattgcgcaactggcgattatcggcgcagtctcgctgacgattctgctgttaaagtggaaagatctgatggtcgtctttttcgatgaaacccatgcgcgttctatcgggcttaatccgggtcgactaaagctgttgtttttcactctattgtccgtctctaccgtggcggccctgcaaaccgttggggcgttcctggtgatctgtctcgtcgtcacgccgggcgcgacggcctggttactcaccgaccgttttccacgtctgctcatgattgccgtcgtgattggcagcctgaccagttttctgggcgcatggcttagctactggctggatggcgccacgggtggaattattgtcgtcatgcaaaccttactgttcatcacagcctttattttcgccccgaaacacggtctgttagccaaccgtcgacgcgcccgcctgcagaaggagccgacatgttcttaacaacgttactggaaccctttcagtttgattttatggtgaacgcccttatggtttcggtcattgtggcgattccctgcgccttactgtccgtgtttttagtgttaaaaggctgggcgttaatgggcgatgcaatgagtcatgcggtattccccggggtcgtgctggcatatattgtggggatccccctggcgattggcgctttcattgccggattattttgcgctatcgccaccggctatctggacgataacagccgcatcaaacgtgatacggtgatgggcatcgtcttttccgggatgtttggcgcaggtctggtgctctatgtttctattcaatcggaagtgcatctggatcacatcctgtttggggatatgctgggcgtatcgctgggggatatcgtacaaacgtcagttattgcactgggtattgcgttaatcatagggctgaaatggaaagatctcctgctacacgcttttgacccgcaccaggcgaaagccagcgggctgaataccacactactgcattatggcctgctatgtatgattgcgctgactatcgtcgccacgctgaaatcggtgggcattattctgtcaatctcactgcttatcgcccccggcgcaattgccattttgctgacgcgacgctttgcgcgcgcgctgggattagcggtgagtctgtcagttattaccgcttttgcgggcgtttatctgtctttttatcttgatagcgcgccagcgccgaccatcgtggtattatttgccatcgtgtttattgcggcatttatttacgcaacatggcgcgacaggcgtaatgaaatcgtaccagaggcgcaaggttaacacttttttgcctgctattcaggaaacatacggtcataatatagagtagtcttatggcgctggaaggatttcctctggcaggcaaccttataatttcattacggtttaagtaaagacttatattcagctatcctttttttatgagcggatatagagagttttttatcgtttagcataacggcattgttatcgaatcgctcataaagcgtttcattctttttgtttactatactgcttcccgccgccggattggcctccacatattcatttaatcgttgtgcgccttgagtatgtttgtaaaaactcaccggcagatagcggtctgctttatcggacgggagaaaaggttcttcaccacacagacgttcacaaatattatcttcatgaatttttactaagttcataaattcaagctgaagttttttggcgagcgccaggctaaaaataccgcattcagaagagcttcgttgaatgtccagctcgaccatagcaaaataacaatcaggcagttgttcacgttcaagagctgctttggtcctcaacgccagtgcaggtccaaaagcgctacacgctgctggttcgaacaaaatcaccgatgtctttccgtccataactctaaaatcgacgactgaaatatggatacctgaacttcccatatttacgagaaatcgggcagattcaacgccttccattctggtctcctttatagaggaaacaagctcatggactgacataacaaatttaagatttaactctggatacttcttattggcctgtgcaacaagaaaaggcatcatttcgagatcggtttcctcgtaactgatatgaatccagctgccatctataatttcactttccagacgctcaacaatacaggtcaatgcttcggtgtttagctccccgctgacgtcaggctgaggcgataaactcgcccccatattacgagtcgtaggacttagcatacttttccctccacatgatagctcctgcaccgaaaatatcatctttaacttttcagattcaatatattgcctgcaaaaatatgcctcaatgattgagccaggctaccaaccacctccggatgattatatataagaattactactcaaaaaatcttttttataataaaagctcaacacatggtcataaatgataaaaaatattttaattcattcctaccgcaatcggtaacgcgcaattatcgtcaggtacagcagggttatgtgcaaaagcagtgcgctgtaaatgcgcgtctagtttcagtccccggaacagcgatagcggtgaagagtccatccccaaacgatacataaccttcttacgataaatactgacggtttttgttcccagaccaaattttttcgccagttcaattgccggatgtccggaggataataatatcagcagcgcatatttcgcctgcgtgacaccgggaggtagattccaccaggcgtattgattgatattaaacaatacctcttccggcgtctcgccggcattaaaagcatacgtagcagccacggttttcttttgtggcctgtggcagaaacgcagccaggcttccggaagacggagcttctctcgctccgagcggatagcgcaggatagttcgtcttttaaaacataatccataacgccaaaatattgcagcacacagcgatcgatataatacaagcgatctgccactaccaaaactttacggttctgcaaccgcgtcagcaacgcatgaaaaagataaacatgctcatgcgggttcaaagctaaaatcagcccggcgtccggcatatcggatagggaatgcaaaagtgcagttaatgagttacacgttttaacgcacttttccggatatttttgcttaaaaatagactgtagggcataacaattagtccagttaataccgtatataattacatttctcatttatttatccttttttgaaaactgaccacagcttcggtaatgatttttcttcctgggcgactactgcgcaagtagataacgccttcttactacaaaggtaataagaccagatacgttattacatgcgcaatgtcgttaccgaaatgaattccttttacaaatctgataatgattaaatttgctgttttactttactgtaatctcttagagtacaacgattgcccggcgcctggtggccatgtatgtctgacaatgaacgctttcgattccctttcattaactacatatcactggtgtagcgatactgaaatatacactacgattaaaaaaatatttggtatctgtaacgcaaacagatagtaacgtttaaaataatttcacaaatcaatggttcattgtacgcataaagctaagcggtgtaatcttaaaatgccgtttaaaaatagcgataaaataagaaggcgtatcatagccacacatcgtcgcgacttgtgaaatatttccagcccccatacgtaataattttatagcctgattcatacgagcatccaggtatattttactaaaactcacctcttcagcggccagttttcgcttcagacttgatacgctcataaacagctttcctgccacctcagcctgtgaccatttgcgggtgagatcgctgataataatgttataaactttctcttttgtcgtaatttttattgctcgctcaaggaaatcaaacccaccgggcttacgtacaaatgccgatataagatacatcaatgagaaatatgaataatcatgatcatcaatactcacattactacaaacccgtggacatgccacaccatgcaaaatagagtcaaaagtatcactcatccctggcaacaagtccgcatgaaaaaaatactttggtttcgtttttaatgatagctctcgatcattatagtttcttgtactgtaaaaaactttgtagaatttttgcattaagtcataggaaacttccagtgaagaaaaatcaatatgcccttctatttcgctcatactaagcgtgattgtttgatctttttccaataaaaataaacacggcgcagatcgttcgatgaactccccaaattcgttttcaattcgcaaactgcctttattaagtttaaacaataagcagtttgcgacataatagtctcttacgtcagctaatccatttattaatggaaatttgttcggctgttgaaggtgattattgctaatggcctcaactgatttattcattgaaggcaataccatattttatcctgtgtgctataaggaactcaaaatcgttatattcttataaacaaataattaaaactcacagagatgatttaaatccgatttttttattattatagccaataattacattccaacgcgcgttcatttcgtcacaaaaagatacccttacaaactttatgcacaattttgtaatgaaagcttacaatattaatataatcatttcagaataaaacggctggcagacatcttaataatccatatacatcaataagatagacacactggcatggtgcattttctgcattatttgctgatatatacaccataccttatcacaaatcgccagcaatgggggttcaccagtcaattgcctctttgttttccccgcccgataaaataatctcctgcatccaggaggtcatttgtgactgtgcgttcattgaaccaactaataccccgtttaaagcctcatataaatgggtgcccggttcaacttttgctaacatgttttgtagcatagccgtttgctgctcaaaagaaacaaaagccgaatcaccactgttaggatctttgaaggcattcatctcttgataaatgctatctttaagcgtttcagaagaggctgactcaggaagcgccaaaagtcgttggtagaatgcatcataaagatcaacgtcgccgccattgcttaaaggcgcgctatccatattattcagcatagcggccctggcactcaacgaaaccacacccgtcgcttcagtatctgctgtcgggaccaaataagaagtcggaatcgtacccggtatcaccttataacctccgcttgcgtttttgtcttccattcatcaataagtgcgttaatggcgttatcagaaattgtccggcagtcttgtggaagttcatcaagatgatgcttaatgacgcctactgccgtttcaacaaattgttcaggtgaaaattctgcgatctgatcgccgcaactcatgataaagcgctgttcctggtgatatttaagattaaaagtgcctggccagttctccataagcaacaccatcagtttttggtgatcttttttcgcattaactggcagtgttaaaaaaagttgcccctcaggcttatcgaaatcccttagccactcatccaggacggttaaaagcgtttcgggatggtcgaccgcagctgaaaataactcgcgggcataaatctgtattttttccatccacttccaggccattgtctgattatcagtaagataagcggcgacctgctgtaacgcgtctatcattccctgctcgtaaccttcctgataggcgtacatccgcaaggtctttgcctcttcttccgcctctcgcaaaatacgcttagcccgttgatgcgcctgctgttctaatctttcaatagagaaataacgttccagcgttttacgctttatcagtatcccctcaacaggcgaaagcggggacggtattgggatatttttgagcatattgtaaggccagtagcaaaattgacatttctacagcatcctgcttcaatgcctcctcaataaatggaggaaaaagcaaaggaaaacgctgtgctaaagattcaggtaaaaattcatttagggcatttaactgtgcatacccgacgctaagtaaaaaccggtgattcggcgccttattgcagacagataaacttgttccctgatgcattgccaaaaatgcttgcgcccaatccggcaggccaagcaaggctccctgccttgccagatcggctctcagtttatggcaaccgagtaaatacgctacttgcggcagtcggcgccactgacgcagccacagctgcgtcagtgagttttgaatacactccttttctccgttcttaagccgccatgccgccagtattaactcatttgccgccgccctggcggcgggtctgacaatcatttccggcgctatctgcaaccgctgaggatggatatacgataacggatcaaaaatgattctttgccagataatgggtaatggctgcctattcatttgacgatttcgccttatcatcagccgttatgcctttcttattgcgggcataatggtttttgtaataccagacgccaaagcctgctgacatcacggataacaaaataatcaaaacaatccaactggttgcaaaagaattacgttttactggtgtgccgggagcctgtaattgggcatcagaacgttctgacaacacaacagaaatgttgtcataatccacatcggcaaaactattctttaagaaacgcttgatatcgctgatctgatgcgcaagcggcgaacctcgttcatatacggctaatgccgacagatgaacaggttttggcgggcggccattttcaccagcatcaatatcataactaatatggaccctggcggagagcacgccctccatcgtctgtaatgactgttccagtcgctgttcaatagccgaatataacctggccttttcagctcgcggagacgataccagcgaatccgccgggaacatctgcgctatttccacccgtggccggggaggaagctgataagttttaatccagtacaccgcagcggtaaaatcaggctcagcaacggtaatgctatagcccaattttccgctatcaattttattcgcctctatattgtgcatttgcagaacggcaatgacctcattagcctgttcctggtccagtccttttaaaagatccttatccttacagccggcaagggtcattaccagcagaaaagtatatagatatcgacgaatcatgagcgtaatagcgtttcaacagccccgactcctttacgagtaagggtactgaccatagaaacatacaggttataatctgaaatcatctcttgcgaaatagccagctctttaggatccgtcaccagattagggtcctcaatcctgttggtaatcgtctgtttatccacagccgtggcaatcgccgaaccagaaaaagcctggagtagccggtcatccagcgagacaatgtccgtttccatagacctgatattgaccgcctgccctataacggcattctcagggacaatagttgcaatcgacataatccaccttataactgattaacggaagttctgaataatggcagcatcaatatccttaaagacttttaccgtgttcgattgcgcgttacggtacaagttatattccgagagcttactctgatacgccgccagtagcgccggatcggagggttttgctgctaatttatccagcgcctctgttacctgcgtttgtagattatcaacgcccgtatcaaattttgctgagacgtcatccagatagcctgaccaaggtgttgccataatgacttccttatttacgttaaattaaagtgggcttgggaaataccaatggcctgggctcattttgatataaccttccgccccgtactgaaatgagcgccccttgagccagtcatcttttaattcgatcgcaaactgcacatagcgtcctccccatgtgcggtaatagctatcgacaaattgacgggctctgagtatttctacatcatcgagcgccccctgaataacaaacgttacgccccccttatgattcctgcgggaataaggtaacgcctgctgttttagccccgcttccgcctggcctgctgcggtaacatcgtccatcaacgtgatgttaaccgaatccgcgtaaggcattagcgctctcagcttttgacttaacacctcgagctctttcttgctcatcgtgtttcgctggcggcttagccagaaaacgggtttacgcggctcatcgaaatgaatccgataataagccagctgcggataataggtatccagccagatagagatacgcttattttcttcgttttcgttaatcactcgcgcatttttatcataatcgcccctcgctaaaacctgacgagcccacaacgtatctctttcattttgcgcagcgacatagagcattttgtcccggcctggcaacacctgaaaacgctccttctcctgccccaataacgaatcgagctctgcggcctgccgctgcggcgagttaagtatccataacgtccccacagtcccaattcccaatataaaaaacccggccagtgctgctacaattccgtttttaaaacgcggctcgttcttttttgcagacgtttctaacttctcaggctgctcgggcacccacggctcgctttccgggcgaatcaggataagcaattcaccgacctgtattggcgtatttaattgcaccgaacgagattcagaatttccttctttcagctcatggagtataatttcggtcgcatccgtatccacctggatttcaaaatttactccgccatggtccagcgggataaaaaagctatcggcaggtatatcagggagttgacctgaagcagtgagcgcatcactctgacctaccacaaagagtgttcggcctgtcagcaatggaaactcacagccgttcagtgagctgttaagtaatcgaactatgtatggccctgggcttgttatcgtcttctcttttgatgtttccatatatactgttagcgatgtctgtcgttctcgatagcagcagattaccgcacaggacacagggattcctgatgaaaatagaatgaaaagtgagaaataaaatcaatttattctgtataatgcgtctcaacacatattaaaagaaccatcatccccattggggcttaaactactgtagataaattacccaaatttgggttcttttggtgtaacaatcagaccattgccaacacacgctaataaagagcatttacaactcagattttttcagtaggataccagtaaggaacattaaaataacatcaacaaagggataatatggaaaatgtaacctttgtaagtaatagtcatcagcgtcctgccgcagataacttacagaaattaaaatcacttttgacaaatacccggcagcaaattaaaagtcagactcagcaggttaccatcaaaaatctttatgtaagcagtttcactttagtttgctttcggagcggtaaactgacgattagcaataatcacgatacgatttactgtgacgaacctgggatgttggtgctcaaaaaagagcaggtagttaacgtgacgcttgaagaggtcaatggccacatggatttcgatatactcgagataccgacgcaacgacttggcgctctctatgcacttatcccaaacgagcagcaaaccaaaatggcggtacccacagagaaagcgcagaagatcttctatacgcctgactttcctgccagaagagaggtatttgaacatctgaaaacggcgttctcctgtacgaaggatacaagcaaaggttgcagtaactgtaacaacaaaagttgtattgaaaatgaagagttaattccttattttctgctgttcctgcttactgcttttctccgactcccggagagttatgagatcatccttagctcggctcagataacgttaaaggagcgcgtttacaacattatatcttcgtcacccagtagacagtggaagcttacggatgttgccgatcatatatttatgagtacgtcaacgctcaaacggaaacttgcagaagaaggtaccagctttagcgacatctacttatcggcaagaatgaatcaggcagcaaaacttttacgcataggcaaccataatgttaatgctgtagcattaaaatgtggttatgatagcacgtcctacttcattcaatgtttcaaaaaatattttaaaactacgccatcgacattcataaaaatggcgaaccattaacattttttgtatctgtcacttaagtaaagatttttattaaaattgtaataatttaaaattcagactgcgcattaacacgctctatcaggatgggaggctattcaatatcattgttctgtccggaagacagcttatactgatatctatggtaatttaaagtaaggctgattatataacacgatttttgtgaacttgtcatcgctatgatgactggtaaaacgatattgccttattcacatcgtaagaattcgtccagatgacactatctccttccggctttaaccctgtggattaaggccggcattttattcatatttatacatcatccgttccctctgagaactatttgcctgaacggtttataccgaaacagtcacgcttgttagctttctgccaggcatacctcctctcttcctcctgatatcgatataatgcctggagccagcctgaggatgatactgctcataaccctcctgcctttttgacgctataactgaagggagtaaagaaaagacgatatcattattttgcaaaaaaatataaaaataagcgcaccattaaaaacagtctttcatttatattttggaacctaagacaaattacactcttaaactttcaacgaatggtcatttagtggaaatcttcgagaaaaatggttctgatggtgtaattatcagaccattaaccatgaagatataataagcagcatttacaccccaaaaaaatgcagtaagatagctacaaaactaatctctattgcaatgaggccaagttaaatatgtaaatatttagatgcccggcgctgactctctctgcaccaggatatacggcagcgtccattcgataatcacagttagttataacaatattattaccaacatgtcagttatttaaagcacaggcataagctaaataatcaaatgttaaaaacatataaacccgagcccgtagaatatgacattaagctcataataaaagctcaacctgaccgttagtactaacagcagaattactgaaacagtagattctatcctaacgacttgtattagttattataacttttcaccctgtaagagaatacactattatcatgccacattttaatcctgttcctgtatcgaataaaaaattcgtctttgatgatttcatactcaacatggacggctccctgctacgctcagaaaagaaagtcaatattccgccaaaagaatatgccgttctggtcatcctgctcgaagccgccggcgagattgtgagtaaaaacaccttactggaccaggtatggggcgacgcggaagttaacgaagaatctcttacccgctgtatttatgccttacgacgtattctgtcggaagataaagagcatcgttacattgaaacactgtacggacagggctatcggtttaatcgtccggtcgtagtggtgtctccgccagcgccgcaacctacgactcatacattggcgatacttccttttcagatgcaggatcaggttcaatccgagagtctgcattactctatcgtgaagggattatcgcagtatgcgccctttggcctgagcgtgctgccggtgaccattacgaagaactgccgcagtgttaaggatattcttgagctcatggatcaattacgccccgattattatatctccgggcagatgatacccgatggtaatgataatattgtacagattgagatagttcgggttaaaggttatcacctgctgcaccaggaaagcattaagttgatagaacaccaacccgcttctctcttgcaaaacaaaattgcgaatcttttgctcagatgtattcccggacttcgctgggacacaaagcagattagcgagctaaattcgattgacagtactatggtttacttacgcggtaagcatgagttaaatcaatacaccccctatagcttacagcaagcgcttaaattgctgactcaatgcgttaacatgtcgccaaacagcattgcgccttactgtgcgctggcagaatgctacctcagcatggcgcaaatggggatttttgataaacaaaacgctatgatcaaagctaaagaacatgcgattaaggcgacagagctggaccacaataatccacaagctttaggattactggggctaattaatacgattcactcagaatacatcgtcgggagtttgctattcaaacaagctaacttactttcgcccatttctgcagatattaaatattattatggctggaatcttttcatggctggtcagttggaggaggccttacaaacgattaacgagtgtttaaaattggacccaacgcgcgcagccgcagggatcactaagctgtggattacctattatcataccggtattgatgatgctatacgtttaggcgatgaattacgctcacaacacctgcaggataatccaatattattaagtatgcaggttatgtttctttcgcttaaaggtaaacatgaactggcacgaaaattaactaaagaaatatccacgcaggaaataacaggacttattgctgttaatcttctttacgctgaatattgtcagaatagtgagcgtgccttaccgacgataagagaatttctggaaagtgaacagcgtatagataataatccgggattattaccgttagtgctggttgcccacggcgaagctattgccgagaaaatgtggaataaatttaaaaacgaagacaatatttggttcaaaagatggaaacaggatccccgcttgattaaattacggtaaaatctgagagaggagatatgcattatttttttatcatcgtaatctggttgcttagcataaatacggcatgggctgattgctggcttcaggctgaaaaaatgttcaatattgaatccgaactactttacgctatcgcccagcaggaatcggcgatgaaacctggcgccattggtcataaccgagatggttcaaccgatcttggcctgatgcaaattaacagcttccatatgaaaaggctgaaaaaaatggggattagtgaaaaacagttgttacaggacccctgcatttctgtcattgtgggcgcctccattttatcagatatgatgaaaatctacggttatagctgggaggccgttggcgcttataatgccgggacgtcgccgaaacgatcggatataaggaaacgttatgctaaaaaaatttgggagaattacagaaaattaaaaggaatgtcagcagaagagaaaaacaaaagactttctatcgcggcaaacaaataattatacagaaatagcttactttcagatagttctaaaagtaagctatgtttttatcagcttgccgtcgtcataagcaactgggcttgcattgcttttagttgtacaaactgtgaggcgtcttccagcattctattgttccgtgaatcccggaaatctgcacgtacctgctccagattactatgaggattatccttaagtacaagggccgccgccatcgttccggttcttcccactccgcccagacaatgaatcatcggtaaatgcttatctgatgaactacgccccggcgcgccattttggttactatttttcaccctatccgccaggtattctaactgatccgtagacggtaacggctggtgatctggccaatttttcacatgcaataccgggattgtataccgcttttccccgcaggacagttgcatattgtattggtctatcgcttctccctgactggctgagctcactttttggctgttggtatgcacctcgccaaaggtgtagctccctctgaaatagggtggtaattgttttgcctgcatctgatcttccgacgttaacaccaccaggcacgagcattctttttcaagaagcattttcatatgcgcttccagcgcatccggcgtattttttgggtacgaaccggctaatgccacaggcttaccgtcaaaagttaacgtattcactggcacaggcattccatcgctcagtttcacctgggtttgctgattaattggaatgctgctgaccgcaaatcgtgccaggcccagtgtcggtccgctcatcgtctgtggcattggcgcgccggcttctattttctcaagttcagctgtaacatttttcagttctttagcaataacgtgaattttttttacagcctgggttaattcatgagtagaggctttatcaacccacctctcaacctctcctccacaggttccccattgtgagaaccgggctacaccgacctgaatatttgttaacgttgtaacataatcattaagttgtttagcctctggaattttatttaaattctgtaaattcgtcattaatgaacgcagcgggccgttacctgaagccatctcctggaagttttctcgcaggctatttccatccatttgttccagttgcggtaatgttcttttaagtccctttagcgcgatatcgagtaaaggttgcttactttctgctccaacatcgttatttttttctgccacttttgtatcgccgccttttatgactaaagcggcattcctgacaccaacattatccttgctcttaataaggtttataaacccttcgtcagcagcttttacacactccgtgatctgcactgctaaacgttgggtaaggggtttgttcatatttatacgggacattaacagtgcgtcattaaccgctgtttccccatatttttccgttagtgcatggagaaatgtctgtaaaatcttttggtcctgtactctgatattttccgtatgtttttgcaccacttcagtgtttttaaataacggcatttttccaagccaggttaatacttttgacgaaaatttttcaggcgcaacatatgccttatcagtattttccttagcaatataaagtcgggcatcattcgacacaccaacttttgaaaacgaagacaacgttaaattattcaattttctctcctcatactttagcatattcctgcagtatgtttttgagcgcttcctgctgattcacaaatgactcaagctgcgatataatatggtaagtatttgtcagatcggtaattgcatgtataagcaacaacgtctctgcggcatcaatatacgctaacgtaccttcattattcgcagccagttcaccattaatcaccataatctgccgccagatagaatcgccacaaacaggcgataacggtataatcataccgttcaataaccagatatcatctttagcttcaatagacgtaaaaatatcgctatcgagtaataataagcactgattgttgtcgtcaaaagtgagcggtaaacccaatttctcaccaatattagcgataatatcctggtgtgcttgcaatttactttcctcttgaattatatcttttataagattgcttcttcaaatttaatctggttacacaatgtcttgatactttttcgcgcccatcgccgggcgcaatatttctctcctttaatccagtagaatagccattcactacgcatcggaacacatatcagcagctccttcggatcattttcaacatgacgtaacttgcctttaataacaaaacgcgaactgtcagcaatatcatcatatattgcagccatacctgaaccgggtactacatgtgtgatgattttcataacaattaatcttattcaattgttgtcaagcgagagaaaaatactacaccctggactcaagactttttttaacaacacggcatatatccgcaaaggtcatcatatcaggaagatcgttttcattgcaactaatgtcaaactcctcactaagaccaaatacaatatcaattaaatccaatgagtcagcgtaaagatcctcaaccagatgggtctgaccattgatactatcaacatcaacggcaatacaagaggtgatcacttttttgactcttgcttcaatatccatattcatcgcatctttcccggttaattaacgctgcatgtgcaagccatcaacggtagtaataacccgatccacgccaggtttattcaggtatgactcgtaagccgggccagctcgccagctaccgtctccgataaggccgtccagcacattacttaacacatagtcagtttccccttttagcctggtcagccccgcctctctggcaaactgcagtgcaatctcagccagtttttctttttgtggatgatgagtaatgacctctttgagagtctccattttcgctttcaattctgggtgcttgtcaatatcgctacattgcgctttcaacgctgcactctttatcgtgtcattgggtaatatttccgcacgcaagccgtcaaacgctctgcgtacagggaacggtgtggaggtatctggctccagggctttacgtatcacacccaaaaacgtctcacgggcgtcgaaatgcattgaatgcatattcgtaacgctcggtactgttgagaggaaactattttgcttaaacttcaaaccagaaaatgggccagtcttatctgtctgactattatcattatcggtcgtaccggctttattacctgtaattaccgtcgtgtctgattgtaaggtatcggttttaacattctcgacgccagccagttgactggcaagcggcttcacattcacaatctctgccgtctggctttgctgtttattatcatcaacgccgtgcaccgtggcctgtaccggcttgccgataatgctcttgctggttacgccatcgacttcatcaaaagaggttgtttcacccgtagtgcccttttctgacgtgaccacctttccatctttactttcggatgaagcgttggtcacagcctctgccgtcgcatgagccgtgacgtcaattttacccgcgatgccatggtcaattgcccctgtgctggcgctgtgtgccgtctccgtttgatgcgtagtcgaatccacacgcgaatgactatgacttacgttgctgctgttagtcgaatggtgtgactcgccattgcgttggctgttatcaataaatgttcggctattatcaatcgtcttccggctattatcatggttgctattatcgatatggcgctggctattatcgacatggcttcggctattgttaatatgcttactgttatccacgctatggttactgctatcaatattaatattgatattaatacccgtaggttctgcttttttcccaccatcaggtactggtccagccgcaggctccggaattttagggtcaggcagtttatctgcaggaatttgtgcaaaaacattacgtagcagcaggggtatcaacgtttgcatttcaaggtgccgggcttcccgtcctacgctggtaccctgctcttgcgttaatttttggtggcacatatcaagcgcctcaacagccttcgccgccgctttgtcaacaaggtgcgtaagattgctgcgggttaacggatctaacgtacagccaaagttatgttcaatgcagctggcaatatagggcatcacctcctgcataacaagattcgtcgataatttacttaattcaccgccagtgttatttttgataatatctaacagctgcttttccaggttttccagcttcgcttccgctttctttgtttctggcagccatggcccaaaagctgacttttctttcaggccatcttttatgatttgcgcggtatactctgcccccaccttcatcagtagcgtcttcgcctcaggagaatcactggtggcgttgagcgctgaacgaaagagcccggcaaactccattatcgctttcttaccggcgacattatttgaattggtaaaaacttcttttaacgcctcagcgtctttcccgcatttaaacaatgcatccagactcgcctgtttgatcagcgcgggaaaatcttccagttgcgggcctttaatttcccctgacagcgtcgctgtggcactttctctgactgcggaaagattcgccgcaagattcgtggcctgcgttttgatctcggtctgcatacctggcattatgacggggggctgagtccttacacttgtaaccattattaatatcctcttctgttatccttgcaggaagcttttggcggtttccaggctgctacttatcgtactgctcagcacttttaccaggttgtcgtacaatgaattggcattgctatatttttgcgtcagcgtctgtaatgtggttttcatattttcttcctgcgctttaaaacccgactgccaggcttgatatttggcgttatccatttcgagttttgagtcttttcccggcgcgcctaaaccatcaatatcctgaaccattttttgtaatggcgtcagatcaacggtgacgacataaccggatccataagatttcaggcagctattcggtaaattcaattcactgagccactgtctcgcttccgcttcagtggctactttaacgccgctgcctgactgcgctggaaataaaacggtattactgtttatttgattatatttattgactaaactgtttaaatcatttttgagtgaggtaacatctagcttaacggtattaccgtccttacctggtaataaccagcctcccattttggaaagaatatcactgaaggcctgataaaaatcggtatagactgcgacaacgttttcataaacgcccagatagctgtcacctatcgccgatatattttgggaaaccatatcccaaatctcagcatcagaaatggttgttctcggctgcgccataggcgaagcgctaaataaggccgacgtcggcgcagaaaacgcgctccgcaggttctcattttgttctgcggataatgacacgccggacttcgccagcgcattcaggctgctggtcaactgctggcgcgccagcgtgcgctcgtcattattctcttcagagatcggtggcgttgactgcagcgtctgctgtgcctggtggattttagtagccgcctgcgataatgaaatgatatctgtaccgcgatgttctgtggtagacggtaccacggcagtctcgacgtgctcgctcgccgagggagtctgcggccgttcggcaacgatccccggatgaggagaagcggaataattttgaatattaagcataatatccccagttcgccatcaggagcgcgattaaatcacacccatgatggcgtatagatgacctttcagattaagcgcgaatattgcctgcgatagcagcgagtgcggatgctttcgactggttaatgctctccattgttttcagcatttcctgaatcaggctggtcgatttacgtgaactttcacgggcttcgtccgatgcggtgctggcaacccggttattcacctggctaatttgctgctcggaacgttcctgagtagcggcgtactgcccggacgcccctgcaataccaccgaccgtgaccgagttcttcataatcagatcgcccgtcatctgcatcttgcgcgcatcgattcgggtcatatccatggtattctgctcaagacgaatatcggattcgacagactcaagacgtttcgacagaatagcctgatgttcaggggagatttgtttattactgtctttaatacccagactttccgtggcgctggttccggcattagatttaagcgtcgcatcattaagatttttcgtcgcatcggtaccggttttcttcatatttaacgatttcagagaatcgacgccttcagcaccgagtttgacgctattctgcccgttcagcacgtttttaatactgtggctttcagtggtcagtttatcgatcttcgcggcattatgtttaagcgcgcctctttcattctgcagccccttatattccagtttggcgcccacgccagtgatccccaactgaagcgcgctctgggaaatactaccggacaacgcattcatcccttcgcgcatcatggagcttgccgtcgttttagctgcatcaaaactgactaatgacaacttaccagacagtttgctatcagcctggttcaacgtcagcattaacgtattcgcggcagccaacagcgcaacggcactggaagacattccgctaatatcaaaaaactttccgacttctgcctgctgctcgcgtaactgggtttgcacaacctcattcgctttagtcgtgacattatttgccagagcattcaaatcctgattcatgtcggtattttgaatactggcttttaaaaaggacgtgatcgttccgggggtttgcgttaatacccctggcgcaggcgcgctcagtgtaggactcaaccccaggtcactgactttactgctgctaataccaatactattcagaatatctttagcgctaacggattgcgaagctgtctgtgaactattctcaacagaatgattatttaaataagcggcgggatttattcccacattactaattaacatatttttctccctttattttggcagtttttatgcgcgactctggcgcagaataaaacgcgaagcatccgcattttgctgtaccgcagaagacatggctttttgcagttccgccgttaccttctggttttcaccaaatatttctacggattgtttaagccactgctgaatctgatccatggcaaaacgggcgagcataaaatcagcaagcgcctcgctggcatttttaataaatacgccctcggcaacaccaccggctgactgggctgcggtattcgtgacttccatgcccaacgccactttatttagggtattacctaccagctctttacttaaggcattcgtttgcaggcccatcttgctacccacattacccagaccgctagtaatacgttgcatcccctgggtaaagagtttgctgccgttttgcgccaactgtttcagcacgttaggcaccaacttcttaatcgtttcgcccatcattttgctcagcgcgttacccagtttcgccgccgcgcctttcccgacaactgcgaccaccacaatgaccgccaccatggcaatagcggcgacaatcgcaccaacaatgctgccggccatctctgccgttttcttatcgacgcctaatccttccagcgctttggtaatcgccttgccaatcagctccattaacggcttcagcacatgctccataatcgggtttagcgcctgctgaataaacgacactcccgtcgccgccttcacaatttcatcggccaccattaccgcaagtcccaccgcagccagcgccagactcgccccaccggtaaaaacagcggccacaacgctgacaatggttagcagcgcgccgaggactttcccgatacatcccataatgcggttcgtttcctcggctttgcgcgtctcttcctggaattcagccgatttcttttccatctccgcctgacgcccttcctgcaaggcgttgaaaagcgcaagatcgttttgcaggctttcttccgtatttttgcccacaatctcaataaacatggccatgagcatagtgaggcgggcgacatttgacagattatcctgctcaccctgggaaacctgattctgagaggcggcattagccgttccctggaatttggtcagaatgttatccgctttctcggctttcgctttggcgtctgtgcctgctttaaccgtcgcatccgtggccttatctaaggcctctttcgcctctgtcgcttcttttccggcctgttctaccgcggcttcagcttgtgcatagccggggtcagccgggtccagcgattgcaatttattttgcgcctgcgtcagttttttggtcgcagcgtcataaacactcttggcggtatccgtctttttgatactggcttcatagagatccgtcgcctcctgagcctctcccagagccgtctggaattctttcgatacctgaatccccatctctttttgtgactcaatcatcgcctgccataccgccagacgagactccagttgagacagcgaaacatcgcccagtagggtcattaacttgccaagcagtaatgtcaattgcccttcgctggagagtttttcccgggcggcgtccgtaggcggctttagacccaccgtattaatagcgctctcgccggactttgttccggctttaaggtcgcccgctttcgttgccaccacatctttaaaagctttatccgccgcttttaaaaagtccgtgttcttacgaacgccttcaaaagccgcctcagcgaggcgcggattttgggtatatccgctacggctaatgctacttgcgtcatttaccataattattccttttcttgttcactgtgctgctctgtctccgccgtttttagcgcctccagatagaccaacgcttttgcccgcagagactcatcttcagtacgttcattgacaagttcaaaacactgtctggcttttgctgccttacgcattaataattgacactgcccggtaaaaaaaacggggcgataatcatttttaagtaacgtaaacgctactgcataaaggtcacatgctttctgaaattgttttttcagttggcatactgccgccagtcccatggtgtaatcgggattgtaaaaatcataaatgcataagaaacgaaagaacgtctcagcttcatccagtcgtccctggttataaaactcataagcatgagcatataaaccgtccatcatatcttgagggatcccatgaacgtcttttagcgtggcgccttcactaacggcatcccaaatcatttccgcaacacgttcttcgctgacattattttgataatccattacttactcctgttatctgtcaccgactttgtagaacttaacgactgcgtttatctgatgcagttattaaaccccgacggtggttagtgaacattcaaaaaacgcccaatgaatacatcgctactgccttacgcggctcaatgccgtacctcgttttcttgtggctgaataacgtctttgcccgcgttttctacctcttccagccaaaccagaagacgtaaaacttcatcaatttcttccagactcaccagatcataacggcgatgggttttgaaaagactgcgcgccagtttgatatcgacgatcacaggtacgccaaccttctccgcataggcgcggacggccagtgcgcgctgattcgtttcatacaccgagatcatcggaatcggcatcaattcgggtttaaaataaatcccgatcgtaatatgcgtggggttggcaacaatcaggcgtgagttttcaatatcagatttcacctgttcagacagaatttccatatgaacttcacgtcttttagatttaacctctgggttcccttcctgctccttcatttcacgcttcacttcttccttatccattttcatatctttcatggtcaggaaatattccgcaatagcatccaataataagacaatcaatgcgcaagcaaggcaagttaataccaatgcgaggagaagttcacgccaaatgacggcaatacctacaatattgccatttagctgagaaaagatttcaaccttatatttcttccagcaaatgatggcggccaccacaaaggatgagagatacagtagggttttgaccgtatctttaaccgtgcgcatactaaaaagtttttttgccccttctaccgggtttaacgccgataaattaggctttaatgcttctgtcgccagcacaaaaccggcctgtaataacgccggtaatgcggaacacactaagcagagcagcataaatggaatcagatattttaaccctatcccaaaaacggccaaactgtagtcagccatgctctgatcaaaattatccgcaataatgatcttaattatccccataaactcattaaatgagccatacgacaccagataggcaattcctcccagcgtcaggcaggcgataatgagatctttacttttaaatgactggccttttttagcggagtcttccagccgttttttagtcggtttttctgttttattcgaggacatgcgtcgcccctcgctcgtaaaaccaactgcttaaccctgtggcctggaaagagagtcgcagtacattgtccggtagtaccggagagaaataaagcagcataattaaaacggcaataccgctttttaccgtcagtgaaatcgcaaaagcgttcatttgcggagcaaagcgcgacaataaacccaggaatacttctgacagcaacagcactaataccaccggactggccagaaccaaggcgttttgagccacctgattaataaacgttaatagcggcggtaatgaaggcgtgcactcgttcatcggatcgcatagctgatagcttttatttaacacgtcaaccatcgtgaccagaccgccgttttgtaaataaacgacagcggcaaacatattcaggaaattagccatttccgaggtatcaataccgtttgccggatcgatactactacttagcgttgcccctcgctggttatcgataatacaacccagcgcatgcataacccaaaaaggccatgacagcagacagcccagcatgacgcctaccgccgcttcttgcagaactaacgggatcatcgccaccgataaaaacggcggcgcctcgttcaatgcatgcggccatactcccaatgccaccaggatgataatggcgtttctcggcgcaccgcttaataccccgctattcaaaaacggcaggaagaaaaaaatcggcgccacgcgagcaaaccctagcgccgcagacgcaaccaggtgatgaatttcaaagtacaacgcgtaaaacattttttaccccttagccaacgccaggaatatcacctgacgcccgtaagagagtaaaacttcgccataccagccagacagtaaaaacaagcataaacacacgccaagtaatttaatgccaaaaggcagcgtctgttcctgtaattgcgttaccgtctggaataaccctaccaggaggccgataatcgttgcgacaatcgtcggccaccctgacaggatcaaaacaagatagagcgccttattacctgcaaacactaaatcatccatttaactatcccgtctcgtaatgatgtcatgttgcaatgtccatatactgtaatatcaatcccttagacagtaaggtccagccatcaagcgcgacaaaaagcaccagcttaataggtgtagatatcgtcaccggactcatcatcatcatccccagcgccagtagcacgctggataccaccaggtcgacgacgacaaagggcaaataaagataaaaaccaattttaaacgcgctttttatttcgctcagcgcataagcaggtaataacgcaaatattgaaggtttttcaatttcatctttgtcacgctttaccgtctcggtctcttctccatactgacgcttcagttgcgcgttttcaaaaaactgaactaactcgcgatctgaatatttgatcagataatcgcgataaccatccagaccttcatcaacgtgtttacttaatgatgaaatatcattaaaggtgacatcttcgtcctcaaaatagacgtaggcatcatgcattatgggccacataacaaacatagaaagcagcaatgcgacgccgttaagcgtcatatttgaaggtatctgctgtaatcccagggcgttacgcaccatgacaaatacaatagaaaatttaacgaaacaggttcctgacgcaataataaatggcaacagggtggaaaatgccagtaaggcaattaatgagatatcattccccattaccagactcgctcagccattcatggatctcaacgcctaaggtgtcattcatctgtaccagttcgccattacccagcaaaacaccattcgccataatttcaacgttaagttcagcattggtcggcagtgataatagctgttgctgccccatggcttcgagttcggcgagggtaacgttcttacgatacaaaacaaattccagtttgacgggcaattgattcaagccaggcagagtttctgcagtttcagttgtattattttcttcttcgatatgttgaatatctaacgtttccacaataattcccccttcaacacggttgaaatgacctaactttttcgcgtagcaataaacttccgcacgggaagtacgaatcaggagtacatctccgatcccgattcggcccagcaacgaacgctgcgtatcactgctaccgattacaaagcgcaacggccaacgcagcattttcggcctgccgcccccgactgcaggcagttcaggaagatgctcaaaccacaggccgccccgatcgctcataatgtgcaacaatttcccttccggcagcgcgcttcccggtacggggttctctacgcataaacgccgacaggacaaatgcggcacgggcaactcaaacggtcgctctgttgcagcaagccagggaacgaccaggtgctcagcgccagcagaaaccgccgccccagccagagcgggagagacatgctcaagccagtccccaggtttaatccaggccgaccaccgtttttctgcatcgctcaaccgaacccacattccctgtcgcgtcggatattccagcgtcgcttcccggccatggcgctggcattctgtcgcggtttgcgccaatagccattcgcgacgatcaatctgtctcacacgcaatgacatcaggcgtcatcctcctcgccagattgctgtctgtgctgttgctgctgcggattttgttgatcgtctcgcgtcaggtgccagcgctggggattaccgttttgccattgatcatgcaaacgatgttcaacctgcgtatttgacggtattaacgaaaactcccctgcttgccgcgcctgaatattgacggaatagtcatttccccagcgctgaaaacggtaagtcagcgagctatcctctcctttcacgccatcggcagtgggaaaaatagtcatcatcggctttgattgcgccgctaaaggcattttttcatcgccgccggttaattggctaagatcggcgatagtggttggttgcagcggaagctgagaaacatctttaacctttttatgatctttatcttcaggcttaccggtattggctgcggccattcgggcaggtgcgacatcccgcgccagcggcgcgccctctttacgaacgccttcgcccgcgatggctttattatccccaggcaatgccttgatattatcgtcagagattcccgtggcgttatcggttacttcactaacggattccacagcttttaaatcagcagataattttttaccgcttacgctttctaacggcctatttttagacgatagcaacgctgcggatttatctactttggcctccgcagagatcaaaccgacagatttttcagcagtgactttcaacagtttttcagcaatcctgagttcgctttttccgttatgatgcagaccagaaacgttgccattgtgatgttctgatttcgctggcgcgccatgtcgccatgccgccagtaataacggtaaagccgtttctttatgcattacgaaagcatcgccatagtcgcgatcttttttatcaccggaatattctgtcttatgtttttccaccgctttttttaatgcttctgataaaccgccaacctcatcctgctgcggcagtaaaatgttcccggatgaactgacagctgacacatcgcccattaaattatctcctctgactcggcctcttcctgctgtatctctcgctggatatagaatcttttctgacggattatccagcgttgatagttcccttctttgcgcaaccaatatttactttttttctgaaactcttcccttttcttttccagctcgctccgtttttcctgaatttgtataatctggagttctaaatcttttatctgccggcgaacaatagactgcttacgtaataacgtataaatttcctcacgactgagctgtctgttttctgcacgcagcgtatctaataacaatttcagacccgctatttgttcaaggatcgcctcctcctcggcctgcagcccgcggtcctcatcctgatagcgaagtaatatcgactcacactgtgaatgaaataccgtacagcgccgctgcaatactttaattctggtcagcgaatgcattcataccgctcaacgtgtcatcaaaggatgaatactgcgctaccggctggcataaccaggctttcaggctatcccgcatctgcatcgcccgatcgttatcgatattttcgccaggacgatattctcccaagtcaatgaaaagctggagctcttccaaacgcgtcattaatttacgcacggcagatgcctgttcagcatgtgtcggcgtcgtgacttgtccaaaaacgcggcttacgcttttcagtacatcgattgccgggtaatgtccctgcccggccagctttctgctcagatacaggtgaccgtcaaggatagagcgaatttcatccgccatcgggtccgcctcttcctcgctttccagcagtaccgtataaaaggcagtaatgcttccctcgctggtcgcccctgggcgttccagcaagcggggcaaattatcgaatacggaggcgggataacctcgacgagccggacgctctcccgacgccagtgccacgtctcgcaaagcacgcgcataacgggtcatggaatcgataaaaagcacgacccgttttccctggtcgcgaaaatattccgctacggttgtcgccagttgcgccgcattgcagcgatcgaccgaggggaaatcggaagtggcaaaaaccagcacgcatttttctttcttatgcgaagcgcgcaacatatccacgaattcagtgacctcacggcctcgttcaccgataagaccgataacaaagacatccgcctccgtttgctcgatcagcatatgcatcagcatggtcttaccgcatcctgcggaggcaaaaatgcccattcgctggcctacgccacaggtcaataacccgtcaatcgcgcgcacaccggtaatcagcggttcacggacgccaacgcgtgaagcgtaagacggcggtgcgacatcaataacgcgttcttcgctaatcggcgccacttcaggggtaaaacgctcaacgattttccctgtcggatccaacaccgcgcctaataccgagtatcccacccacgccgataacgcacgtccagtgggataaagcacgacatcgcggctcagcccctgggcattgccgataaggctcagcacggtgcgttcccgctgtaagccaaccacctgcgcacgtgcaacaacctgtttttggtgccagccacggcgtatttcacacagttcgccaatggccacatcgcgcaattccgcctcaataattgggccggttattttttgtgggtaggccagatattgcagtaaacgaggtgttttcatctcattagcgaccgactaaaaacttccagatagttgtaaaacccattcaaggcagtagagaacttttcaccgtcagataaaaaatccggatgcactaaggctttaagcgttagctccccattctgctcccccagtagtaattgcccgccgcgggcaaaatggcatccttccattatggtcattaagatttcataagcccgctgttgtaataccaccatgctgtcagcacccaattgcgcccagatccatacatcatcgtccttgacgctgatacagatacttggcaatgcaaataaatccagaacaattgttgaatggctatctattcctccaattaatgaaggatcgcaaccacttacttccagtgcggaacgaactaattcagcgatatccaaatgttgcatagatcttttccttaattaagcccttatattgtttttataacattcactgacttgctatctgctatctcaccgaaagataaaacctccagatccggaaaacgaccttcaatcattttcttaataaatcgacggacatcgacagacgtaaggaggacaagatctttatgtgcaatcaataaatcatccaacttaagtgtaatgagatccatcaaattagcggaggcttccgggtcaaggctgaggaaggtactgccagaggtctgacggatccctttgcgaataacatcctcaacttcagcagataccattactgctcgtaattcgccgccattggcgaatttatgacaaatataacgcgccattgctccacgaatatgctccacaaggttaatgacatctttttctcttggcgcccacaatgcgagcgcttccataattaacttcatattacgcacggaaacacgttcgcttaacaaacgctgcaaaacttcagatatacgttgtaccgtggcatgtctgagcacttctttaagtaaatcaggaaatttcgcttccagttggtccagcatatgttttgtttcctgaataccgaaatattcattgacgttgcgcgccagcgtcaccgccagacagtggtaaagctcatcaagcgcgttccgcaacacatagccaagctcccggagtttctccccctcttcatgcgttacccagaaatactgactgctaccttgctgatggattgttggattaataccaaaggacacgacttcatcggaataatttaccactcgcatcaaatcaaaatagaccgtaaattgttcaacacggatctcattaatcaacaatacgatgctgttatcgtccaggccctcgccatctcgtaacaatacttccggcaggcgcacgccataatcaataaagaactgactacgtagacgctccgcaagttgagctttttccagatcttcacgccggctcttcggcacaagtaatatcaacggtacggtctctgtagagactttatcgagatcgccaatcagtcctaacgacgacccttctttttcctcaatactgagcggctgctcgcctttgctggttttaggtttggcggcgctacgttttgcttcacggaatttaaaatagaagagtacgcttaaaaccaccgataaaataacaaaaaccggcagtgggaatcccggcagagttcccattgaaatggtcaaaatagccgtaacaaccaatacaaatgggttgttcaacagctgcgtcatgatattccgccccatattatcgctatcgccatttacgcgggtcacgataaaaccggcactaatcgcaatcaacaatgcggggatctgggcgacaagaccatcaccaatggtcagcatggtataagtagacagggcggaggacaaatccataccatggcgagtcatccccaccgaaataccgccaataaagttcacaaagataataatgatgccggcaatagcgtcacctttgataaacttcatcgcaccgtcaaaggaaccgtaaagctggctttccctttccagtacgcttcgccgttcgcgcgcggcatccgcatcaataataccggccttcaaatcggcatcaatactcatctgtttaccgggcataccatccagagaaaatcgggccgcgacttccgcgacacgttctgaacctttggtaataacgataaactggaccacggtgacaatagagaagacaacaaaacccaccgccaggctatcgccaataacgaattgcccgaacgtggcgataatttcaccggcatcggcttcaatcaagataagacgactggtactgatcgataatgccagacgaaagagcgtggtaattaacagtaccgcaggaaacgttgaaaaactgaggattctgtcaatgtagaacgaccccataaacaccaatatcgccagtacgatattcagtgcgatcaggaaatcaaccagataggtaggtaatggaatgacgaacatagaaatgatcatcaccattagtaccagaatcagtaattcaggtcgtaaacgagcactgttaagtagagaaagcagcactataggtatcctgttaatattaaattaagacagcttttcaatagtacgacgctgttctgccatttcatgcttgtaggcaatatcggtcatactacgtaacgccattaacaattcttcctgccaatattcttcataaaagagtgaagagggtatggctttacatacttgataaaatatctgcaaaaaggatgcatgttctttatgactaagcaataacgcattcaaacctataatatcggctaacagcgaatccacttcatgtggctgttgcaatagcgaaagcatcagtagtaaccacgacgactcctccgcattaaacgctttggtaaacgaatacgacaacaatgtactcacaaacagtaggtcagcggagcgcaacattttaagttgcgtcaggcgtcgtaaaagctggccaaactccaggcgcgaacagctggcgtcattcgcgtcaatatcggttaatagcgaaccctcaataaaatccagtaccaccagtcgacgttgatagccataactggctatccagtcagagtaaatctccacttcatgtgattcactctggataaattgccgatagctggcgcgcaataagcctggttttaacgataatgttttcccaaaaagccgggccttcaacgcacaattaatccctgccttgagggtcttcggatcggtttgctcttcaacgtgcttaagtaacgactccagctttttccgcacgatctcttccaggtctttacgacgaagcaattcgcgtaacacaaggactaaatcactggggtcaggaaataagctacgcgcctgacgtaaaaaatcttctaacgcgccgccatgtacgctaattagctttaagatttgcttcgccttcggtaaagcctcatcctccagcacgcgttcaaaactgttagataaattactggattttttttcataatcgcgacggttacgaaattgcgccagcgccgctgacatttcgtccgtcgactggacaaatttttgtacttccgcccctggagacgaatcctctgcggcctgttgtatttccgcctgttgcgcatcagtatgctgggtcgcatcctgatgagatgtctgccgggacaatattctggaaaatgaaataccggaggttgagccaggaatcatttaattgcctcctgacctctatccagataaacacgaacccatttctgtaacttatcgtccccactccaggcaccgctttgcttcagaatattgtttaccgattcgctggcatccggcgttaacgggtcgacaatttcttttggttcaatcatgaacacacgaacaacattacttttattcttactggaataacggaacaggctaccaataagcggtaatttgcctaaaaacggaatactttggacagtatcggtatttgcatcccgtgtataacccccgaccagcaaactttttccgtgcggcactctcgcaatagtgctaattaacgttcgcccgacttcgggtaacgcatctacggaggtggtagtatcagattgcggcgtcttatcgttgccatcttcaatgtccagcgacatttctatctgaccatctgcggaaaaacggggcagcactcggatcattgttccgtatgttacatgctcaagcgccacattacgttccccaatcagcttggtgtaaaacgttctgttgttatcaaaaatagcgggaacattttcctgagtcagtaataccgggcgcgaaaccaccgtcgcctgtttcttctcttctaacgcattgaccgcggcgatgaatcgactgccatcgagggtacttattgaagactggtttaatgacacgccaagtttgtccccaatagttatgctgccgctccatgaagtgcccaaacgctccagatcgcttttattaagatcgacaatccacagggataattctacgtgacgtttggcgacatccagcgctttaaccagcatttcgataaaatgcacctgctcagccgttccctttactaacaaactgttggtatccggataggccacgattttaatattgcccgccgcggcattttgctttaaagcttcctgcagactcatgccaccggcataatttgctgctttacctttttctccattcgctgaaaacgctggcatcgccgggggttcgctactgacaatattacctaagggttgctcttctccctgcaataacctttcaatggccgtagcaataccgggaataaccattttctgatcgcgcagattataggtacgatcgcccacgaaggtattgttcagacgcatcacccctattttctggcgtcccagctcaataccatcgttttgcttgtccatcatggtggcggcgttgaccaccatatcaacatagacgggtggccctgaaacatagaatgttcctttacggttatcgccacgtagcgggtaatttttgttatataaacctgagcgttttagaaaattgttgaactcattgagtgagacgttgcgtaaagaaaccacggcattgcgcatttcactggcgtcataaatatagatagcctgcccatcgaaataccaaatcagccccagttgtagggaaagcttctccagtaatgcgttaggatcgtgaaactcaaagttgcccgtaattttttttcgtgccgccattttgctaacaatgacaggctcctttagctgtagcgccatggcatcgaaaaatgtccgcaggctatcgtctttcgcaacaaacccacttcccgttacaggtattttttcactagaataaccaggtgtaaccagaacaagcgcggcacatgccagcactctggccaaaagaatatgtgtcttcatttgtctgccaattgaataatatttgataatttccgcggcgaaacgccgatcagctctttgatctcactagaaaaatgtgaaggcgatgagtaaccatgattaacggctaattgggtgatgttctcgtggccttctacactattcagcagcgattgcgccatacgccagtttcgtaattcactcttcgcttttccgcccaacgctctgctgcacaaacgacgaaaatgggtataagaaacgccatagtcttctcccagcattctcatcgtgttgccgctggttgactgagcgagtaaatagccaaccaaccagtaactctcgctttttcgtaacagcgccagtaccttattgaaggccggagaaggcgtaataatttgctgcaaaaaccagtactcgcagcgtttacgatcttgccaaatagcgcgaaactcaggactcagcaaaacccatttatcggattcagcatatgtcgtgtccactaatcctgcgccatcgataaatgccagtaatttgctgagtacttcaatttttaacggtcgaaaaaccaggtctcctgatactggtgcgacaacggcctgctcgcaaaaaagcagcgcgccttcctgaatcaggcaattttcattgtgtcggctttcagaaaatgacatatgcagcttttgcgcggaacacgtctgtataaaccatgcttccgggctgcggattttccgcttctctccttctttaagtacttcctgcgtatttagcatagttgtcagcaccagttaaaaatcattttaatatgtaaacaataccgggagcgggtggcaaaatcctgatgcaatcattatgaaactgatgccgcccgctaattaaattggccaacttgcatagtgtttgctgatttaaaatagaaaattagctcatagtgtataaattctggcttattgttctgcagcagcaaaaattcagatattgtcatctggatggagaattaattatttatatcaggagttttttttgctagcattcctgaaacgcattcgcccccttataactattgtcagataacgttctgacggttgtgtaaaaacatggcgcctcattcttctgtagttggagttaatatgaaaaaattttatagctgtcttcctgtctttttactgatcggctgtgctcaggtgcccctcccttcctccgtgagcaaaccggtacagcaacctggcgctcagaaagagcaactggccaacgcaaatagtattgatgagtgtcagtctcttccgtatgtgccgtcagaccttgcgaagaataaatcattatcaaaccataacgctgataattccgcatcaaaaaatagcgcaatcagctcaagcattttttgcgaaaaatataaacaaaccaaagaacaggcgctcaccttcttccaggaacatccacaatacatgcgttcgaaagaagatgaagagcaactcatgaccgaatttaaaaaagttttgcttgaacccggaagtaagaatttaagcatatatcagacgttacttgctgcccatgaaagactgcaagccttataaggccatatcaccgttggctgaactcatcatgatataattaagaccatattttgcattgccacttaatatcaatataattattatagctatggtcacttttacggttggccatttgtctcttacgttgcatttatcaatctgctttttgatacagcagcacctcgctgctgctttttttatttgtgataaagaacggcctcccagacttgggaaatagccgaaacttatactgacaaactatcgtctcgtatatcgcgataaactgacatccccctcctgccccacatgttggcattcttacgataccccatccacttttcgcggataacgctctttttacccgtgacagcgtattgacgaccaggctagtatagcggcagaaacgtcccgatgcctggaatgaatggcaaacagtctataaggtgattgaatggatacgacagaagaactaaacggaacctacttctaccacggacaatcgaacctgtcagcaggtgaactatttgatgtaattttcattgagcaattttgtgatgaacttgggattggcattgagtcaggtgctgctatcctcgccgggcaaccgtggttaaaaaccagaacgaaaccgggagaggcaatcaaagggacaagtgttatctccaggtatgggagaatgcttttacgaaatgcacgaactccttttggtattagagttcctacacccgttggtataagaatgcgaaaaacaaataatcttgccgcagtcatagcacgatatgttccatggttaggttgggttggtcttgtgaattcaatttaccaggtatcaaggagaactcaggcaaaatacaacctaatagcacgccctaaagatcgtatacaatggacatccttttgatggacacaattcagcaagaggtgttagcactcttccgtgaagagattcccggatatttagacagcaattggaaagaaatcccattagaacttgattctgatttatttgaagctccaggcgatgacctgcatgaagctttggataaatttgaaaaaaaatttaatgtagatttatcacaagttaaatggtcgtgttatttcccttgggagaatactccactgcttacacgatggtttaaattaaaacgggaagatgtagaacgaactcgtaagcctttaacaatcagaatgttttctgaatcagcgaaagctgggaaatggctttatgattaatgaaaaatatgtcgaattaatcaggagctaattactatgaattttgttaatcgattaaaattaaaagtagtaaatttcatatacttttcaaattaaaataatgtgttgtatctacctttcgaccaccagtaactctgacgccatccgttttaaattgaccatttggttctggtggtatatcgcaagtagatatttctgaagtgcttgactattcactcttttttagcctgcatgtatggtggcgacgatgctgttacataggtaccggtatattaccaaattgattctgccagatatcccgcctcacgtagagcattcataattttattcgctaattcatactgatattcatacgaggtattctccatggaaaataccgttaattcatatttataatacagccaaccatcattctcatttatcaacttaggattacagtcataatttctttctattgtaatcattgtattttcgtatcttaaatataataagttcacttttattatgtctggaatcccttgggataaaaaatcaattaactcatatttatccagatcagactcaacaacgattgtgaattcagagttaacttcttccattatggaacctcaatatatgggcctctattaaacggtgatgattgtttcattaccgatacctgtatttttgttacatcatccggatgaaagtgtaggatatacatcctcccatatgccaccttcatcaccagggcctaatgcacgccgttgagcctttgttgatttttaaccttctgatcttactcagcaatagtggacacgcaactaagtgagtaaacgctcaagcaagaggtgactcacatgacaaaaccagcatcaaccaccaataagccacgcaagcagcacacgcctgaaagccctgaaactggcggaacgcattggggtggccgctgccaccagcgagcttaacctgtataaatcacagatctacagctggcgaaactcagctctcttcttctgaacgtgagcaggagatgtccgccgcttagggttgtgtccctattacgcgggtaggatcaatcaagcagttacggcaaaaaagagaatcatggatatatttagcaaactccctgatgatacgtaatcagtgagattaaaataatgcaatcgcgataaaccgaagttaatcccctgtttaaagacagtgagcgaccttcttgccatgcctggactatatcagcctcatatgtacgccttgaaagcgtacagatatgtattataattgtacatattgttcataaacaggaggatgaaaaccatgcctcagatagctatagaatctaacgaaaggctgtcgttacgtgtatcgacggatgccaaaaagttgatagtccgcgctgcggcaatccagcaaaccaacctgacggattttgtggtcagtaacatactacctgtcgcacagaagattgttgatgccgccgaacgggtatatctgacggagcgcgatactaaaatgatcatggaaattttagataacccgccagcgccgaatgaaaagcttcttgccgctgctttcgccctgccggacatgaagaaatgatgtttacagactggcatgaggccgcgatagggaaaacccacaatcgaatgaattttgattgtggggatgccgatctgaaccaattcctgcaacgccatgcacgacaaaatcatgagaaagggacaacgaaaacctatgttgcgcttgataattcggatgttacacgtatccacggcttttactcagtcagtcctgcatcactgatatatgcacaggttcccggcgcaatcagcaaaggattagggagatacgatgtgccggtgtttcgtctgggtcgtttagccgtagacaaatctatgcaggggcaagggctgggagcacaacttttgttatctgccggaaagcgttgcatacaggcggctttgcaggtcggtggcgtagccctacttattgatgccaaaaataaacaggtctgcgactggtacaaaggatttggcgcagtaccattaaacgatcaacccctttccttgttgctgtcgtttaaaacgctttatgctgctttatctgcatctggtaggttatgacaacatgaggctttgttgaataattcagaatcggccaacgataaggatacaggactcccaccggagcactcgttatacgagcctgacgctggtcggcattgccaacaacgtcatccggttcagcgctttgaccatcgccatcgcttcacccacctgcgcgtcatagttccgcaggctcagatggccgcccagcaaggttttgatacggaacatcgctgtttccactactgaacgacggtgatagcccactttcttttccagacctcattgctgccgctccgatgttgattttaaacttttgctttgccatcggaacccgatgctgaaacgacagtaacgattagatccgccaatctctttattcaacaaagccccttcgggatagagcttccgctgagcgggaaagtatgcctttgcaattaatcaataaagtgttgcgcgagaaatcgtgcatctttcaagcacatcgtctactttaattaaccgattcataaaatatatattatctgttcatttctagcctgtaggatattttaataactgtatattttaaacaataaaaattaatattggcctacttttttgttataataccagactccaaaattgtgctataggaacatcatggaattaattcgttatgctgacatcaacagcgatctctatcgccacatttgggtcgttggtgatattcatggatgttactccttattgttaaccagactggctcaattaaatttctctcctgataccgatctcttgatctccactggagataacattgatcgaggaaaagaaaaccttgaaacactgagactgttaaataccccatggtttatttctgtagtgggtaatcatgaagctatggcgcttgacgcttttgaaacacaggatggcaatttctggtatgtaaacggtggttactggtacgactcggtcaccgaaaaagacaggcaagaagccactgagctattactaacttttaagcagcgtcctcacatcatagaagttgaaacgtcctcaaagaagtacgtgattgcccatgccgattatccagatgacagctacgattatgggaagcaagttgatattgatagcgttctatggtcacgcgatcgtctgcttggttcgttacaggggaatatccatccaatacgcggtgcggatacttttatcttcggccatatgattgttgactacacaacaacattcgccaatcaaatctacattgacaccggttctttctgttcaggcaatctgtctttttttaaaataaagtaatctggaaatagaattatataatatcaaccctccctgcattatgggcaatgatatagccttcaataagtaccattgcccattcgtaatagcgtctaaatttcgcgtttttctgcccatttcagcattaagatcgcaggccaaaaaaacgaagccgtaatccgacgcaggtagttactcgatcgcctgagaagagtaaagatcgcacagctccagatacctatcggaagaaaacgcaataaccgtggtggcgaaatggatcggcttgccttcatgcaacacaatcttgattacagtctcgagttcggaagcatccgtttccctcttaattttgttgaaatttctctttgttgcgagcatggtctgaactaattgcctggcagcttgccttgtttcgtcaatatttggaaaatcgaacacatttccaacttttactttcaagacagaacttggcttcctaccctcactgacattacgatctgacgaggctactcttcgctggattacgtaggtttttttcgtcaaactggcttttaccccgaaaccagcaggagcttctctgtggtcatcgaaaacagtgtagagtttttgagctgggttagcttcgaaaacgatttttccagagcgactgagtgcaggcttaacattgatacttaacttgttgataatgaaaggctggctgagagttgttttcaaagtatcacccctgttgtagtccaggaatgatgagaatgtaacctgtcacattttaggctacaggtgagctacaaatttatgggtttatgtgagtttataagggttttacctggggccacatgagcacttgaaagaataaaaaaacgagtaaaatcaatatgaatgagtcatttgataaggacttctccaaccacaccccgatgatgcagcagtatctcaagctgaaagcccagcatccggagatcctgctcttttatcgtatgggagacttttacgagctgttttatgacgacgcaaagcgtgcgtcgcagttgctcgatatttcgctgaccaaacgcggcgcatcggctggcgaacctatccctatggcgggtatcccgcaccacgccgtagaaaactacctcgcgaaactggtcaatcagggcgaatccgtcgctatttgcgaacagattggcgatccggccaccagcaaaggtcccgttgaacgtaaggtcgtgcgtatcgttacgcctggcactatcagcgatgaagccctgttacaggagcgtcaggataacctgctggcggctatctggcaggatggtaaaggttacggttacgccacgctggatatcagctccgggcgctttcgtctgagcgaacccgccgaccgtgaaacgatggccgcagagctgcagcgcaccaatcccgccgaactgttgtatgccgaagattttgctgaaatggcgttaatagagggacgccggggtctgcgccgtcgcccgttgtgggagtttgagattgataccgcccgccagcagttaaatctgcagttcggtacgcgggatctggtcggtttcggcgtcgaaaatgcctcgcgtggattatgtgcggcaggctgcctgttacagtacgtaaaagatacccagcgcacctccctgccgcatattcgttccattacgatggaacgccagcaggacagcatcattatggatgccgcgacccgccgcaatctggaaattacccagaacctggccggtggtgtcgaaaataccctcgccgcggtgcttgactgtaccgtgacgccaatgggtagccgaatgcttaaacgctggctgcatatgccggtacgaaataccgacatattacgtgaacgccagcagaccatcggcgccttgcaggacaccgtcagcgaactgcaaccggtgctgcgtcaggtcggcgatttggagcgtatccttgcgcgtctggcgctgcgcaccgcgcgtccgcgcgatctcgcccgaatgcgtcacgccttccagcagctgccggaattgcacgctcagcttgaaaccgttgacagcgcgccggtacaggcgttgcgtaaaaaaatgggcgatttcgccgagctgcgcgacctcctggaacgcgccattattgacgcgccgccggtactggtccgcgacggcggcgttattgcgcccggctaccatgaagagctggacgaatggcgcgcgctggcggacggcgccaccgattatctcgatcgtctggaaattcgcgagcgcgagcgtaccgggctggatacgctgaaagtcggctataacgcggtacatggttattacattcagattagccgtggtcaaagccatctggcgcccatcaattatgtgcgtcgccagacgctgaaaaatgccgaacgctacattattcctgagcttaaagagtacgaagataaagttctgacctcgaaaggcaaagcgctggcgctggaaaaacagctatatgacgaattgtttgatctgctgttgccgcatctggccgatttacagcagagcgccaacgcgctggcggagctggatgtgctggttaacctggccgaacgcgcctggacgctgaattacacctgcccgacatttaccgataaacccggtatccgtattaccgaaggtcgccacccggtggttgaacaggtactgaatgagccgtttatcgctaacccgctcaatttatcgccgcagcgccggatgttgatcattaccggccccaatatgggcggtaaaagtacctatatgcgacaaacggcattgattgccctgctggcctatatcggcagttacgttccggcgcaaaacgtggaaatcggccccatcgaccgtatttttacccgcgtcggcgcagcggacgacctggcctccgggcgttcgacctttatggtggagatgaccgaaaccgcgaacattctgcataatgccacggaaaacagtctggtattgatggatgaaatcgggcgcggtacctccacgtatgacgggctgtcgttggcctgggcctgcgcggagaatctcgcgaataagattaaagcgttaacgctgttcgctacccactacttcgagctgacccaattaccggagaaaatggaaggcgtggcgaacgtccacctggatgcgctggaacacggcgatactatcgcgtttatgcacagcgtgcaggacggcgcggcaagtaagagctatggcctggcggtcgcggcgcttgcgggcgtccctaaagaagtcatcaaacgcgcgcgccagaaactccgcgagctggaaagcatctcgcccaatgcggcggcaacgcaggtggacggcacgcaaatgtcgttgcttgccgccccggaggagacatcgcctgccgttgaagcgctggagaatctcgatccggactccctgacgccacgccaggcgctggagtggatctatcggctgaaaagtctggtgtaaacgtgtcagacccgatagcgccgcgctatcgggtctgcgcgccggaacaggcttttcaggctgtgactgtcgtttcgtgtaaatgacgccagactatccgtcctctttccctttttaaaatgaccgtcgaccagcgtaccgtctcggcctggcccggcagttgctgtcgctcacgataacgcagcgcggcgccttccggccactccgccacaaggtcaatgtgctcaaccacgataaccagacccgggcgacacgcgcgctgcgcctggaaaaaagcgcccagcgccggataatccagacaaacaccgcctggcgttatcatcgtaaaatcagcagcgaaacgcgctatcaacgcctccaggctacccacccccttactaagccagttctcaatcgccgcatgggcatgaataatttcttctttatatggattcatgatctttcctttttcaggcacagaagcgcctgtctattgtttagacagacagcgtaaataaggggcagcagggtgataccggcggcggcaataaaggtccagcgataagcaacctcaagcgacataacgcgctggagcgcatttaacagcagcgtcaacagcgtcgcgccaaggaaaaagctgatctgacgattaagattccatagcgcgctggcgtcaggcatgtcccggcgagcaatagtcaggaaagcgccactctgcgcggtactgctgcacaaactgccgccagcgcccattaaggcgaatatcatcatcagtacacggtgcgatgtcgcaggcgtaacgttagttaaaagcagtatccctgcggcctgaagaagacagccgacgataatcagcggacgcggcccaagccgattgaagtaacgtccggtaagcataatggcgacaaatgaagcgatcgaccaggggatcatcagcgaccccgccgccgcaggcgatagctgcgcgacgttctgtagataaaacatcccgaccacgctgataccaatgaacatacccggcacacacagatagacgatcatggcaaaacgcagcagcctgtccgtcaacaacggcagatggagcaatcttgctgacgccattgtcgtcgacgcgacattcagccaacgataagcgagcaataaggtgagaacggccaccggcagcgtggcaaagaatatccagcgccagccgcacgtttccaccagcagcccgccaatcgcaggcgaacatgccggcgccagtagcgccaccatcatgacaaccgatgacacgccagcgcgttcatgcggtttaaactgttgccaggttaacgcctgaccaaccgggatcaataagccaccgcccgccccctgcacaatacgccagaaaacaaggctgtgtaatgaatcggcaaaacctgcggcagcggcggcaacgctaaacagaatgagcgaaaatatgatcagccgtcgtgcgccgagataacgcgaaagaaacgcgctaaacggaacgatcagcgttaatcctgcgatataaccgttactcacccatgccagcgccgatatggacgtatgcagatccacggacatcgcaggaaaagccacgctggcaataaacagattaatcagatcaagaaagaagccgagcaggtaaaccactgccactttactgcgatacgtcattatgcatcctccgtcagaggcgctaatgtagccgtccggagaaagccagataagtccgcgcttcaacgatatactgtcaaaataattttgacagtaaaggagctcgccatgctcaatttgcagcgtatgtcgctgtttatcgccgtggtagatagcggcagcttcacggccgccgccgccgcatcgggccaaacaaaagcggtagtgagttttaatattcggcagcttgaaaaagagcttggcgtaacgttactgctacgttccacccgacgattgacgctcacagacgccggcgtcctcttttaccaaaaaggcgtgaatttactcaacgcagcgaaaaatttgcaggatgaagtgcgtgccagccatagtgggctgggcggcgagttacgtattaccactacgcccgagtttggcgaacaggtgatcattccgttactggcgcagtttagtcagcgccatcccgatctccgtattcggcatatgtcctcatcacatcatgccgatttaattgccgagcgctttgatgtggcgattcggcttggctcgctggccgactcccgctatcgcgccgcgctgatatcccgctttaccattctgccggtcgccgcgccgcagtggctcgcccgcaaccccgtgtcgtcgctggagtcgttggctcaggcggaatggattattcatgagcgattacctacgccgctacggtggacagtaacgagtaatcatggccaacactcacgcctggagataagcaaagccggcaaaatttctgtcgacagcgcgcgctcgctgatggccttcgctctcgcgggaagcggcgtcgcattactgccgcaatggttagtcaacaccgcactggaggatggaacgttaattcacgtgttacccgactatcattttccccgtcagggcatttatgccgtttacccggacgcccgccatgtatcgacaaaagtacgcgcatttattgattttttacgttcgcaatgggattgcggggagcacgccccatcatcgtagccagtccgggagcattgcgctcccggacggataatactgtcttaatccttaactaccagcttgtctttgatcccctgcgcctgccaacgcacccacagcataattgccgccagaacaacaatcggcagtaacggatcgagccaactaccgccggaaccgaacagcaggttaatcagcaccacgccggtgccgccaatcgcccaggcaatggtcgtcggtacagaccaaaccaccatctgctgtttgacatcagagacgcccatcatgcggttaaccacccagaacaggctatcgttgaagtagccgaagaacagcgaccccatcgttgcggcctgagcggcaagcaacatattgatgccggggatctgcgccaggatcggcgcggaaatcgaggcggcagtgatcatcgccaccgtccccgatccctgaatcaggcgtaccagcgtcgccacgataaacgggatcaggatcggcgagatcggcaggttggcaacctgctccgccagctgttgccccgcgccgctgtcgcgcaggatcgcgcccaacgcgccgccagcgcccgtgaccagtaagataatcccggcgctttgcaagccctcttccagacgctctgcggtggtatgtttatccatgcgcggcaccagcgtatacaccgccagcagaacgctgatggccaacgcgatcaccggacttcccacaaagttgattgcctgtaccaccggatgcgtcgccaggccggaccatccttctacagtggcgagggtggaacagatagccttcaggaagatcagcacgatcggcaccacaataggcagcagagagagcgtcaggctcggcagatccttttgctctttctctttattgtactgctccagcgcggcattgacttcatcggcgttcagcgtgcgcggcacgaaatcagggtagcgtttatccagccactgcgcatagaacacaatgccgatcacacagggcaccgccagcgccatcccggtcaataacattgcgccgatgtcgacgttaaaaatcccggctacccccagcggaccgggcgtcggaggtaccgtatggtgagtgaccaccagcccgcccgccagcgcgacgcccagcgtcagtagcgaacgcttaccgcttttcgccagcgctttcgccaccggataaagaatgacaaaagcggaatcgacgaaaatggggatgctgacaatataacccgtgatcgccagcgcccactcttcacggcgtttccccagccatttgataaagctccaggcgatacgctccgccgcgccggaaacctccagcaagcgccccatcattacgccgagaccaatcaccaggccaatgctgcccagcgtcgtaccgaatccgctggtgatgacagagagcgttttatcaatgcccattccccccaacagaccggcaatacaggccgccgccagcatcgcgatcagcgcatgaacacgggtgcgtaacaccagccataccagcacgaaaacggcaacgatcagaccgataattggggtcggtaaacttgtcatgacctcccctccatatcatcttgtcgaaagcgttcgataatgtcatcgaagcgtttatcggcgacaaaacctaacgccagcgcacgctggttatcgatacgtcccggccaggaggcaacaattttctcgacgccttcgtcgcgctgatgcgtaacccgatcgcgcgccgcctggccgcccgcctgacacaacgtttccagcatctcgcccacggttacgctgatcccgggtaagttgatgctgctcgcctcgccaggcgcgggtaacgttgcggccagcgacaggttatggatcaccgtcgccgggctggaaatccacagccgcaaactttccgacaccgggcagacggtcgtctcgccctgcaacggttcacgaataatcgcgctgacaaaagaagaagcggcgcggtttggtttacccgggcgaacacagatcgtcggcaaacgcagcgccagcccatccacatagcctttgcgggtatagtcgttgaccaacagttcacaggcggccttctgcgcgccataagacgagcgcggcgtgagcgcggtggtatcggtgacgcattccggcagcgtaccgccataaacggcaagcgagctggagaagacaaaacgaattttctgcggttgtcgacgacacgcctcaagtaactggcgggtaagatccaggttaactttccatcccagatcgaaatcgtcttccgcatgactgctgacaatcgcagcgagatgataaacaacagaggtattagcggtaatcacactctccagcacgcccggctgggttaagtcagcctccaggcagcgtaaacgaggggaatctgataaccgtgcaggcatttttaaatcaacaagaagcagttcgttaaacgccagcgatgagtttaataaggcgcttgcgagtttctggcctaaaaagccgcccccgccggtaatgataatctgcatccggatgtcctctttattgctgtgtagggtagttcagggttagcgccaggcgttaaaccagccaagcccgtcctgagtggtattccgtggttggtattcgcagcctatccagccgcgataacctacgtcatcgaacagccggaacagccatgggtagttgatctcgccatcatccggttcatgtctgtccggtagcgaggcgatttgtacatgggcatagcggcccgcatactcgcgaatcaggtgactcaaattgccatccactttttgcgcgtggaaagtgtcgagctggatgaacacattcgggcggtcaacctcttctgcgatgcccagcgcctgatattggctggaaaagaggtagccgggtttaacgccgggactcagcgcttcgatcaaaatacgtttatcgtgggcggcaaaccggtcggcggcataacgcaaattatcgataaacgtggcgcgataacgtgcgccatcagcgccatccggcacgacgcccgccatgatgtgaacctgctcgcattccagcgccagagcgtattccagagccagatcgatatcggcgcgcgcgtcgtgttcgcgccccggtagcgcggcacgtccccattcgcccgccgcggtatcgcccgccgaagtattaaacagcgccagcgtcagattatgacgcgatagctgggctttaatctcgctggcggcaaagtcataggggaacagaaactcaacggcctgaaaaccggcttcagcagcggcggcaaaacgctcgataaacggcgcttcggtaaacatcatcgacaaattggcggcaaaacgcggcatcgggttatctccttaactgcgcaatttcttcggtggttaaataacgaatcgggcgttcgccaaggataaaaatcagctttgccgtctcttccagctcctcggtattattagcggcttcctgcaaattctccccgcacacgaccggcccatgattagccagtaaaaaggcctgatgccgggccgccagcgcagccaaatcgcgggcaattcggtcatcccccgggcgatagtagggaaccagcggaatgtcgcccatccgcatcaccacatagggggtaaacgggcgaatcacattttgcgggtccagcccttcgagacaggaaagcgccgttgaccaggtgctgtgcagatgtatcacggccttgcagcaagggttattgcgatacaacgccagatgaaaacgcacctctttagacggtttatcgccgctgagccattcgccctgcgggtccactttggatagccgctgcgggtcgagattacccagacacgaaccggtgggcgtcgccagaatattgccgtccggcagtaacagcgagaggttgcctgccgagccggtggcatagccgcgctggaaaaacgaggcggctatcctgaccatctcttctcgcaaagcgtgctcttcttttgccagtatcgtcatacctgaaactccctttgagcacggatgaaaaaggattcatcgccaaaattacctgactttagcgccagcgagactggcgcatggagcgcgttgacccacggcacgccgggtgaaatgcacggtccgatgtgaaaaccggtaataccgaggctttgcgtcaccacgcccgaggtttcgccgcccgccacaataaaccgggtgataccgccttccgctaagcgagcagccagcagggaaaagagcgcctctaccgcatggctggcttcggtagcgccatattgctgctggatggcggccagcgcctgcgtggaggcggtggcgctaatcattggcgccagttcgctgtcctgactgagcacccactgcgccagcgcttcagcgtaggcctcgcgcgtctcggatgacaggcagcgcgccacatcaacgtcgcgtgtgggagcatgttgtcgatagaaagccacctgctgattcgtcatttgcgaacaggaaccggaaagcaccaccgcgcggccgctcagcggatagcctgcggaacgggcctgagaaacgccgtgcttcgcccactgacgcgccagccccattgccagcccggaaccgccggtcaccagcggagcatcacgcaaaacctcgccctggatttccaggtgccgctcattgagcgcgtcaagtactgcgtagcgatatccttcctgctgtaaacgcgacagcgccgcacgggtcgcggcaacgccttcatcaagcgtctgagctggaataacgccgcagcgcccttgcgcctgcgcttccatcagacgcggcaggtagctgtcggtcatcggattgattgggtggtggcgcataccggactccgccagcaagtggttcatgacaaacagatagccctgataaaccgtgcgtccgttaaccggcagcgcgggagaaatcacggtaaatgaggtatccagcgccaccatcagcgcatcggtgaccgggccgatattgccttcggcggtactatcgaaagtcgagcaatatttgaaatagacttgctggcagccctgttttttcagccataccagcgccgccagcgattgttttatcgcctcttgcgccgggcatgagcgggttttcaggctgataaccaccgcgtcgcacccttccggttgcgtcccggttgggacatcattgatctgcactgtcggcatcccgttttcgaccagaaaactggcgatgtcggtcgcgccggtaaaatcatcggcaatgacgccaatttttaacatgacggctcctcaggcgtgacgccaggcagagtaatccccgagaaaattttgatcacagcgctgtcatcctctttgccataaccggcgttactggcgctggtgaacatatttaacgccgtagaggccagcggtaaggggaagcgcagcgctttcgccgtgtcggcaaccagccccaaatctttgacaaaaatgtcgacggccgaacgcggggtatagtcgccgtcaacgacatgctgcatacggttttcaaacatccaggagttgccggcggcatgggtcacgacgtcatacatcacgtccagaggaataccggcccgcgcggccagcgccatcgcttcggccgccgccgcaatatgcacgccagccagcagttgatgaatgattttgacggttgagcctgcgcccggcgtatcgctgatgcgataaacgttgctggcaacggcgtccagcacaggcttcaggcgggtaaacgccgcctcgctcccggaggccatcaccgtcatttcgccctgcgccgcttttactgcaccgccggaaaccggcgcatccagcatgttaagattcaatgccgtcaacgccgcggcgatctcttgcgcgtcggcgcttgagatcgtggacgaaaccatcaccgcgcttccgggtttcatcagatgggcgacgccatcctcaccgaataacacctgtctgacctgggcggcattgacgaccagaatgactaacgcatccacgacgccggcgaactccctggcgctggcggcagccccacaagccccttcagcgagcagattcgcgcacgcttgcgggttaagatcggccccccatgtggaaagcccggcgcgcaggcatgaacgcgcagcgcccattcccattgagccaagccccacaatgccgacatgaaaatcggttcctgttgtcattatcactccatgttaatttacgtgatattatgttttgttatgtgaatataggcgtttttgtaaacaattgcggtgagttgtttcacaaaaaataacaaaatgtgttattttttgtgaaggcaatcctcatagaacttcacacgctgtgacgagaaatcgcgtaaaatcgcgacaggactaaagaaaggagcagacgttgatacctactgagcgtcgacaaatcattcttgatatggtagcggagaaaggcatcgtcagtatcgctgaactgaccgagcgcatgcatgtatcccacatgactatccgccgtgacttacaaaaactggagcagcaaggcgcggtaatccaggtctctggcggcgtgcaatcatcgactcgcgtggcgcacgaaccctcgcatcagatcaaaaccgaactggcgacgccgcagaaagcggcaattggcaaactggccgccagcctggtacagccagaaagctgtatctaccttgatgcaggtacgaccacgctggcgattgccaggcagctggttacgatgaataaacttacggtggtgacgaatgatttcgttatcgccgattacctgatggacaatagcaattgcacaattattcacactggcggggcggtatgccgggaaaaccggtcgtgcgtcggtgaagccgcggcgacgcttttgcgcgggctgatgattgaccaggcctttatttccgcctcttcctggagcgtgcgcggtatttcaacgccggcagaagataaagtcacggtgaaacgggccgtcgccagcgccagccgccaaaaaattctggtgtgcgacgcgaccaaatacggccaggtcgcgacgtggctggcgttaccgctggcggaattcaaccaaatcgtcaccgatgacggcctgccggaaagcgcaattcgggcgctggccaaagtggatatctcactgctgatggccaaacaatagcgaagcggcgcaagccgcttacgtcatcatcttgcgtaccagttgcgtaaactgttcgcgttcttcagcgctcagtcgccccaaaaactcatcgtcaacgcgatcccccagtggtatcgcggcggtgagcaacgtttggccctgaacggtgagatagacaaaacgccgacgtttatccagcggatcgttttctcgttttaccagcccacgattttccatccggcttaacatctccgccagcgtcgctttagtgctgaccgccgcttcggtcagatcgacctgttcaatacccggatgttcagcaataacgcgcatcaccgcatattgaggtttggtgagctccggtagttcatgctgccagcgtgcggtatgttgctgaaaaagttggcgtaacagatgaaacgcggtgtttcgtaactccatgagcgctccggataaattaactttttctatcataacgacttatgcacggttttttaatgacgaatgctttagctaaacgtgcgcaggcgtcgggagcgatcttgtcgcaaaggccgtgtgggcgtattttgatcaaaatgttcgtatacgaacgatatttgaggtaagaaatgagattgattgtggggatgaccggtgcgaccggcgcgccgcttggcgtcgagctactccaggcattgcgggcgatacctgatgttgaaacgcatctggtaatgtcaaagtgggcgaaaaccactattgaactggagacgccctacacgcccgctgaggtagccgccctggcagattattgtcatagcccggccgatcaggcggcgaccatttcctccggctcatttcgtaccgacggcatgattattatcccctgcagtatgaaaacactggcgggggttcgcgccggctatgccgaggggctggtgggacgcgctgccgatgtcgtgttgaaagagggtcgcaagctggtgcttgtgccgcgggaaatgccgctcagcacgattcatctggaaaacatgcttgcgctttctcgtatgggggtggcgatagtgccgcccatgcccgcgttctacaacctgccgcaaaccgttgacgatattatccagcacatcgtagcgcgcgttctcgaccagtttggtctggagcatacgcgcacgcgccgctggcaaggactgcgacagacagcaaatttttcacaggagaatggataatggcatttgatgatttgcgcagttttttacatgcgctggatcagcagggacaactgctgaaaatcagcgaggaagtgaatgcggagccggatctcgcagccgctgccaacgcaacgggacgcatcggcgatggcgcgcccgcgctgtggtttgacaatattcgtggttttaccgacgcccgcgtggcgatgaataccatcggttcctggcagaaccatgccatctcactgggtttgccgcctaacacgccggttaaaaaacagatcgatgaatttattcgccgctgggacaattttccggtagcgccggaacggcgggcgaatccgggctgggcggaaaataccgtcgacggcgacgcgatcaacctgtttgatatcctgccgctgtttcgtctgaacgacggcgacggcggattctatctggataaagcctgtgtggtatcacgcgatccgctcgatcccgataacttcggcaagcagaatgtcggcatctaccgcatggaagttaaaggcaagcgtaagctgggtctgcaaccagtgccgatgcatgatatcgcattgcacctgcacaaagctgaagagcgcggggaagatctgccgattgcgatcacgttgggtaacgatccgatcattaccctgatgggcgcaacgccgctgaaatacgatcagtcagagtatgaaatggcaggcgcgctgcgtgaaagcccctatcctatcgccaccgcgccgctgaccggttttgatgtgccgtggggatctgaagtcattcttgaaggggtcatcgaaagccgtaaacgtgaaattgaaggaccgttcggcgaatttaccggccactattccggcggtcgcaacatgaccgtggtgcgtatcgataaggtctcttaccgcagcaaacccatttttgaatcgctctatttgggtatgccgtggacggaaatcgactacctgatggggccggcgacctgcgtgccactgtatcaacagctgaaagccgaatttccggaagtgcaggcggtaaacgccatgtacacccacggcttgctggccatcatctcgaccaaaaaacgctacggcggctttgcccgtgcggtgggcctgcgagcgatgacgacgccgcacggtctgggatatgtgaagatggtgatcatggtcgatgaagatgtcgatccattcaatctgccacaggtgatgtgggcgttgtcgtcgaaagtgaatccggcaggcgatctggtacagctaccgaatatgtccgtcctggaactggatccgggctcaagcccggcggggattaccgacaagctgatcattgacgccaccacgccggttgcgccagataaccgtggtcactatagccagccggttgttgatttaccggaaactaaagcctgggctgaaaagctgaccgccatgctggccaaccgtaaataaggagtaaccgatgatttgcccacgctgtgccgatgcacatattgaactcatggcgacttcgccggtaaaaggagtctggacggtatatcagtgtcagcattgtctgtatacctggcgcgataccgaaccgttacgccgtaccagccgcgaacactatccacaagcgtttcgcatgacgcaaaaagatattgatgacgcgccaatggtgccgagtatcccgccgctgctggcagaagacaaacggtaaaaaaaaggccagtcgacagactggcctttttttgacaagggtacttactcgcggaacagcgcttcgatattcagcccctgcgtctgcagaatttcgcgcagacggcgcaggccttcaacctgaatctgacgaacacgttcacgcgtaagaccgatttcacggcctacatcttccagtgtcgcagcttcatatcccagcagaccgaaacggcgcgccagcacttcacgctgtttggcgttcagttcgaacaaccatttgacgatgctctgtttcatatcgtcatcttgcgtggtgtcttccggaccgttctctttttcatcggccaggatgtccagcaacgctttttcggaatcaccgcccagcggggtgtctaccgaggtaatgcgctcgttgagacgaagcatacggctgacgtcatcaaccggtttatccagttgctctgcaatttcttccgcactcggttcgtggtccagtttatgcgacaactcacgtgcggtgcgcaggtatacgttcagctctttaacaatgtgaatcggcaagcgaatcgtacgggtttggttcatgatcgcccgttcgattgtctggcgaatccaccaggttgcgtatgttgagaagcggaacccgcgttccgggtcaaacttctcgactgcacggataagccccaggttgccctcttcaatcaggtccagcaacgccagtccacgattgccataacggcgggcaatttttaccaccagacgcaggttactctcaatcatgcgacggcgagaagcgacatctccacgcagtgcgcgacgcgcaaaatagacttcttcttcggctgttaacagtggtgaatacccaatctcaccaaggtaaagctgagtcgcgtccaacacacgctgtgtggccccttgcgataacagctcttcttcagccaggtcgttatcactgggttcctcttcactcaaggctttttcgtcaaaagcctctactccgttctcatcaaattccgcgtcttcatttaaatcatgaactttcagcgtattctgactcataaggtggctcctacccgtgatcccttgacggaactagcaagtcaaagcctggttccgccgctttatcgctgcggtaaataacgcagcgggtttacggatttccccttgtaacgaatttcaaaatgcaagcgtgtagagctggtgccggtgctacccatagtagcgattttttgccccgccttaacttcctgttgttcccggaccagcatcgtatcattatgggcgtaggcactcaggtaatcatcgttatgtttgatgataataagattaccgtaaccacgcagtgcgttaccggcatatacgacgcgcccatcagcggttgcgacgatagcctgtcccttactgcctgcaatgtcgatccctttattgcccccttcggaagcgccaaagttttcgatcactttgccatccgtcggccagcgccatgcggaaatcggcgcgctggttgacgtactgcttgcatttggttcggtcgtgcttaccgttggtgccgttacaggcgctgtgacaaccgtcccagcaggcttgttgtttggcaacattttgttagcactttgttcacctgagccctcagaatacgtaattgttggttgagacgcaactgcaacggtggaattttgtgcagacctggtcacaactccttgctgtgctgcatccgcctgggtgatcgcatttccgccagtaattggcgtaccggatgcgttaccaacttgcaaagtttgccctacattcaggctatacggggcagaaatactgtttctctgggccagatcgcggaaatcgttcccggtaatccaggcgatgtaaaaaagcgtatcaccctttttcacggtgtaagtactgccacccgtatagctacctttcggaatattcccatactggcgattgtatacgattcgcccattttccatctgcacgggttgttccgtgaccggttgagtttgcatgggctgcgttacaggacgctgaacgggttgaatttgcggcgcttgttgcggcgtttgttgcgtcgtcgcgcccatttttggcggcggtgtgatcaacatcccggaattggtatttgatgacgaaccactgtccacagacgtgaccggcgccggagggtttgacgaactggtacaacctgccagccatagtgaaaccagtgatagtgccgcaatgcgactaacggtgaattttgggcttcccgcgctcatttatcccccaggaaaaaatttggttaacaaccagtgacgtaagaaccgtgcaacgcattaagtgaacacgggaaaatgtgttcacgatacgcttaacccaccgggaataaccaggaaaactccaggtattcgtttcggcttcatcaggcgtaagagtgggtgtttgcagggcaaactaggccagctctcccttgactaacgggacgaagcgaacggcctccacggtatcgataataaattcgccgccccggcgacgcacgcgtttcaaaaactgctgctcatcgcccacgggcagaacaagaatgccgccttcatccaactgtgccatgagcgcggtaggaatttccggcggcgcggccgtcacaatgatagcgtcaaatggcgcacgcgcctgccagccttgccagccatcgccatgacgggtagaaacattatgtaaatcgagctgcttcaggcggcgacgcgcctgccattgcagccccttaatccgctcaacggagcaaacgtgatgtaccagatgcgccagaatcgccgtctgatagccggaaccggtaccaatttccagcaccctggattgcggcgtcagttcgagcagctccgtcattcgcgccaccatatagggctgcgaaatcgtctgaccctggcctatcggcaaagcgatattttcccaggccttatgttcaaacgcttcatcaataaatttctcgcgcggcactgcagcaagcgcattaagcacctgctcatctctgatgccctgcgcgcgcaattgttcaagaagagcctgtacacgtccacttaccattgcgtgccaactcccacgctgtctaaccagtctgaaaccacatcatgcgcgctgtgcgcggttaaatccacatgcaacggcgtgacggagacgtagccttcatccaccgccgcgaaatcggtatccggcccggcatcgtatttatcgcccggcgggccaatccagtacaatgtattaccgcgcggatcttcctgcgggattactttatccgctggatggcggctaccacagcgagtcacgcgaatgcctttaacctgcgctaacggtagatccgggacattcacgttgagaatacgcccggtacgcaacggctcccggcttaaccctcgcaaaagcgcgcaagtcacggccgcagccgtatcataatgctgatagccgttaagggagaccgctaatgccggaaagccgagatgacgaccttccatcgccgcggcgacagtaccggaatagatcacatcatcgcccagattcggacccgcgttaataccggaaacgacaatatccggacgcggacgcattaaggcattaacgcccagatagacgcaatcggtcggcgtccccatctgtacagcgatatcgccattatcaaaggtaaaagtacgaagcgaagattccagcgtgagggaattagacgcgccgctgcggttacgatccggggctacgacctgtacatcagcaaactcacgcagcgctttcgccagcgtttgtataccgggcgcgtgaaccccgtcatcgttactcagcaatatgcgcataatcacccattgtgttgatcagttcccttactacgctggtggcaaaactgcctgcgggcagccagaaacgtaactcgacggtaacgtcatcccaccagttccagcttaattgttgcggataaagcagcatcgctctgcgcgacgcctctactttttcgcgcagcaacagcgattgcaacaccgtttcctgggcaatggcatcttgctcaaacgccagcgccgcacgctgtgttccccactctccgctgcccggcaacgacgctgtaatcatcagctctttttcgtctacccggcgctgcaattcaggcagttcttcagatgtcgcgacgaaccagcttccacgccccgctaattgtagcgcatcgccgtcaacaacttgattaaagtctggtttcttcagccgctggtgaacaatttgattaaacaacgcgctacgcgccgccgacaaccaaaaactgcgtttattgcgatcgcgcaccggcgcgttactttgcgcccagcgcagcgcgccctgcaagttgctgccgccaatgccgaatcgttgtgcaccaaaatagttcggcacgccgccatcgcgaatcgcctgcaatcgtgtttcgacatcgcggcgatcgcttatttcacgcaacaccagagtaaaggcattgcctttcagcgcgcctaaacgcagcttacgcttgtgacgcgcgtattccagcactttacaaccttccaactgaaaggcgctgaaatcgggcatctctttccccggcacgcgcgcgcacagccactgctcggtaacggcgtgtttatctttttgcccggcaaagctcacttcgcgagcgtgaattttcaggaatttcgccagcgcgtcagcgacaaaacgggtattgcaaccgtttttcaaaatacgcagcaaaatgtgctcgccttcaccatccggcgtaaagcctaaatcttcaaccaccacaaaatcttccggattcgctttcagcaatccgctaccttgtggttttccgtgcagccaggtgagattgtcaaactctgtcatttcgccgccttcatcagcaacgcgaccgcttcgcaggcaatgccttctccgcgtccggtaaatccgagcttttccgtcgtcgtcgccttcacgttaacctcatccatatggcagccgagatcttcggcgataaagacgcgcatttgcggaatatgcggcagcattttcggcgcctgcgcaataatggtgacatccacgttgccgagggtgtaccccttcgcctgaatacgacgccaggcttcacgcagtagttcgcggctatccgctcccttaaatgccggatcggtatccgggaagagcttgccgatatcgccaagcgccgccgcgcccagcagcgcatcggtcagcgcatgtaacgccacatcgccatcggaatgcgccaatagccctttttcataagggatacgcacgccgccaataataatcggcccttctccgccaaacgcgtgtacgtcaaaaccgtgtccaattcgcattatgctttctcctggtggatggttcgggtcagataaaattccgccagcgccagatcttccggacgggtgaccttgatattatccgcgcgaccttctaccagcgccggatgaaaaccacaatattccagcgctgacgcttcgtcggtgatggtcgcgccttcattcagcgcacgcgtcagacaatcgtacaagagttcgcgggggaaaaactgcggggtgagcgcgtgccataaatcggcgcgctctacggtatgggcaatagcgttcttccccggttcgccgcgtttcatggtgtcgcgcaccggactggcgaggataccgccgacccggctgttttcgctgatagccagcaaccgcgcaaggtcatcctgatgcaaacagggtcttgccgcgtcgtgcaccagcacccactgcgcctttgcaacggcctgtaacccggccaaaacggaatcagcgcgttcgttgccgccatccacaacggtgatttgcggatgattcgccagcggaagttgggcaaagcgatgatcgccagggctgatagcaataacaacgcgtgtcacccgaggatgcgccagcagcgcatgaactgagtgctccagaatggttttattaccgattgagagatactgcttaggacattctgtttgcattcggcggccaaatccggccgccggcaccacggcgcaaacgtccaataaagtggctgccatgttaaatccctggatggtttatcgatgagtttgccccgccgttgccgcgcgttttgaggcgtcaggcaccagacgatagaaggtttcgcccggtttggtcatgctaagttcgttgcgcgcgcgctcctctatcgcttcctggccgccattgagatcgtcaatttcggcaaaaagctgatcgttacgcgctttaagtttggcgtttgtcgcctgctgcgcgaccacatcatcgttgacgcggctatagtcatgtatgccgttcttaccgaaccacagcgagtactgtagccagaccagtaaagccagcaacagcagcgttagtttacccatcctgccccctgaaaaacggcatcatcatcccataacgtcctctgtgactccacattcaggacgggattgccgcgacaacgccggcaaatgtaccacatttgccggatgttacgtatacccgagtaaggagaacataatctcattgttggttacggtttgaattatgaccggaggcgcagtgataacccgtctaccctaatagccatataaataacgcgccgaacagcgcgcctacggccagtagagtaaacatgatgctaaaaagtattttgccctttaccagcagatgcaacgcaatgccgataatcaccgataccggcattaacgcgaggaaaaagggccaggtatagaggaaaaaaaacagcgtgttagggccataaagcagaaaagggatccccaacgccagcagccatgacacaaagccgaccaccgcccccggaaatgcactggtggcgtcatcgtcgaccatgaaggcgtctgaccttgtgaaagtaatgttatggctattacgcatattaaatcctgtaaccttgaccataccgggcatacaagcccggtggtgtctcaggatctgataatatcgcgccgtctcagcaggtctaataattgggaaaccaaatttgttactaattgttcaccattaagatgaacctgtggcgagtcaggcgcttcgtaaatggcgtcgatgccggtaaagttacgcaactcgcccgcacgcgcttttttatacaaccctttaggatcgcgctgttcacagatagccagcggcgtattgacataaatctcgataaaacgatcgtggccgacgcgctcttttaccagttgccgctcggcgcggtgcggagaaataaatgccgtcaaaacaatcaggccggcgtccgccatcaggctggccacttcgcctacccgccggatattctcctggcgatcggcatcgctaaagcctaaatcacggcacaaaccgtggcgcacattatcaccatccaacaggtaggtactgacgccacgctgatgtaacgcctcttccagcgcgccggccaccgttgattttcccgaaccggagagtccggtaaaccacagcaccacgccacggtggccgtggagctgttcacgggcggcgacagtaacgggatgagagtgccagaccacgttctcatcatgcagcgccatgtttatctcccagcaaatctcgggcgtcccagtgcggaaaatgacggcgtaccagcgcattcagctccagctcaaacgcactgtattccacgggcggcgtcgctccgcgttcatccagttcccgcaccatgccagcgcccacggtaacgttagaaagtcggtcgataaaaatcagcccgcccgtcaccggattttgctgataaatatccagcgcgagcggctcatcgaatgtcatctccaccagaccaataccgtttaacggcagactttcgacgtctcgttgggtcagattgttgatatcaatctgatagcgaatagcctcgatacgcgcgcgggttttcttacccgcaagtttaacgtcgtagctttggcccggcgccagcggctgttccgccatccataccacgtcgatcgcagcgtgccgcgcaggtgccagcgtctcgtttgccgccagcagcagatcgccgcggctaatatcaatgtcgtcgttgagtaccagggtaatggcttcgcccgcacaggcttcttctttgtcgccatcaaaagtaacgatacgcgccacgctggattccacgccggacggcagcactttaatgcgctctccgactttgacgctaccagacgccagagtgccggcatacccccgaaaatcaagatttgggcgattaacgtattgtactggaaagcgcatcggttgacggtctaccgcacgctgtatgtctaccgtttccaggacttccaacagcgtcgggccgctgtaccagcgcatattggcgctctgcgcggcgacattatccccttccagcgccgaaagcgggacaaagcgaatgtccagatcgcccggcaactgttcagcaaaggtcaggtaatcttcacgaatacgggcgaaggtctcttcgcggtagtcaacgagatccattttgttgattgccaccaccaggtgtttgatccccaacagagtggagataaagctatggcgacgcgtctgatccagcacgcctttacgcgcgtcgatcagtaggatcgccagatcgcaggtggacgccccggtcgccatattacgagtatattgttcatggcccggcgtgtcggcgataataaattttcgtctttccgtggagaaatagcggtacgcgacgtcaatagtaatgccctgctcacgctcggcctgtagcccatctaccagcagcgccagatcgagtttttctccctgcgtgccatgacgtttactgtcattatgcagagaagagagctgatcttcataaatttgcagagtatcgtgcagcaaacgacctatcagcgtacttttaccgtcatcaacgctgccacaggttaaaaaacgcagcaggcttttgtgctgttgggcaatcatccaggcttcgacgccgccttcattggcgatttgttgtgcaagtatggtgttcatggcggctccttagaaatacccctgacgttttttaagctccatcgaccccgcctgatcgcggtcaatcatcctcccctggcgctcgctggtggtagaaaccagcatctcttcgataatttccggcagcgtttgcgcgtgggattccaccgccccggtgagcggccaacagccaagtgtacggaagcgcaccatcctttttttgatgacttcgccaggctggagatcgatacgatcgtcatccaccatcatcaacatgccgtcacgttccagaaccgggcgttcagcagccaaatacagcggcacgatgtcgatgttttccagccagatgtattgccagatatcctgctctgtccagttggagagcgggaagacgcgtatactttcgcctttattaatctgaccgttatagttacgccacaactctggccgctgatttttcgggtcccagcgatggaaacggtcacgaaaggagtaaatacgttctttcgcacgggatttttcctcatcgcgccgtgcgccgccgaacgcggcatcaaaaccgtacttattcagcgcctgctttaacccttcggttttcataatgtcggtgtgtttagcgctaccgtgaacgaacggattgatgcccatcgccacgccttccggatttttatgtaccagcaattcgcagccgtatgcgttggcggtacgatcgcgaaaggcgtacatctcacggaatttccaaccggtatcaacgtgcaatagcgggaacggcaacgtacccggataaaacgccttacgcgccagatgcagcatgacgctggagtctttaccaatggagtacagcatgaccggattagcgaattccgctgccacttcacggataatgtggatactttccgcctccagttgccgcaggtgggtgagtcgtttttgatccataaccgttcctttgcaataccgttttttgctaaacatttcgattacacgactatagggagcgcaggagagtgaatgaaatgacgaattggaatgagtagttcctcaaaggaataacgcggcccaaaaaccaatatcaaaaaatgcttaacgtaccggattgccagcatttaggagcaaatgaaattgtattaacacgatcgcggtttcatactagccacgtaaaattttgttctgtatttaaggactcattatgttttccgcaacgcgccgctttgccgtcattctggcgctcggcgtaggctttatccttcctgcacaagcagcatcaccagggcctggtgaaatagcgaatactcaggcacgacatatcgccaccttttttcccgggagaatgacgggctcccccgccgagatgttgtctgccgattatttacgccaacaatttacccagatgggataccaaagcgatattcgaacgtttaatagccgatttatttataccacgaaggataatcgcaaaaactggcataacgtgacgggcagtacggtcatcgccgcccatgaagggcgcgtgccgcaacagatcatcattatggcgcatctggatacgtacgctccgcagagcgacgctgatgtcgatgccaatctgggcggtttaacgttacagggaatggatgataatgccgcgggattaggcgttatgctggaactggcggcgcgtctgaaagatataccgacccattacgggattcgttttatcgccaccagcggggaagaagagggaaagctaggcgcggaaaatttactcaaacgaatgagtgacgctgagaagaaaaatacgctgctggtcattaatctcgataacctgattgttggcgacaagctctattttaatagcgggaaaaatacgccggaagcggtgcgtacactgacccgcgatcgggcattagcgattgcgcgccgttatggcatcgccgccaacaccaatccgggacgcaatccatcctaccccaaaggaacgggttgctgtaatgatgcggaggttttcgataaagcgggaatatctgtgctttctgttgaggcgacgaactggaatctgggtaaaaaagacggataccagcaacgcgtgaaaaatgcctccttcccgaacggtaatagctggcacgacgtacggcttgataatcaacagcatattgacaaggcgctgccagggcggattgagcgccgtagccgcgatgtagtgcggataatgctgccgttggtaaaagagctggcgaaggcggaaaaaacgtcctgatatgctggtgaaacgtgtttatccccgctggcgcggggaacatttttcagcccttgtcgactgcggaacgcccctcggtttatccccgctggcgcggggaacacgcgaaatagtggggaaaaacccctggttaacccggtttatccccgctggcgcgggaaacactaggccttgataccatcgctcgcacctcgtcacggtttatccccgctggcgcggggaacacgtttattactgcttagttaattaatgggttgccggtttatccccgctggcgcggggaacacaggcgaataatctctaatagtctcaattcgttcggtttatccccgctggcgcggggaacactaaatctggcgtcgagacattcgaaatagtgccggtttatccccgctggcgcggggaacactcttttgattttgctgcgatgttataaccagacggtttatccccgctggcgcggggaacactatccacatatacccgcaatcatattcaagaacggtttatccccgctggcgcggggaacacaatcactgcgggggtatttagcggaaacggctcggtttatccccgctggcgcggggaacacgatcgagtaacgtgcgctggaacgcgcacctcgaaacggttttaaaacactaccgtttcggtttatccccgctggcgcggggaacactggaccgatggggccaacatcgccgaacgtggcggtttatccccgctggcgcggggaacacgttacgttcggtaaatggaaagcggcgaatatcggtttatccccgctggcgcggggaacacccagaaagtgccggtagtgcctgatgaacgaccggtttatccccgctggcgcggggaacaccgcgcccacttccgtaaaatacagataatccacggtttatccccgctggcgcggggaacacggcagcgggcgaggcaaacacattcggggcgtcggtttatccccgctggcgcggggaacacggtaatttctcatctaacagcctgtacgcctcaggtttatccccgctggcgcggggaacacgaatctaatgcaacagatgaataaacacgtaacggtttatccccgctggcgcggggaacactctttatcgtcaatgcgaaattttccgcgacgcggtttatccccgctggcgcggggaacactcccattcaccaacaacaatatcgccctgcaacggtttatccccgctggcgcggggaacacacttccttcagtcttaacgataatccgcaacgcggtttatccccgctggcgcggggaacacgcaaaatagcgatgagctggctacgcccactggcggtttatccccgctggcgcggggaacaccagcacgaaaaattatttactgtcgttgctcacggtttatccccgctggcgcggggaacacactaaaactatatatttgttctaaaagcccttttttactacataacaaactaccaacggtaagataacaattccttattattaaagaacattcaacttattgattttcaacaggaagaaaagaaaccaaacgcagtccatccaaatctaccggaatacgtctgttttcaccccaggtctggaactcaaaaccagactcagtatttgttgcccaggccattactacgtttccgactccgccaagctgtgtgatctgttgccaaatcatttcccgaatacgcttcgaggtatcgccaacataaacacctgcacgaacctcgagtaaccagacggcaagacgtccccgcaggcgcggcggtacgttttccgtgaccacaaccaccatactcatcaaccatgcccccgatggccgctatcacccagtgattcaggttccggtattgctggcggcaacatatccggcgcaggctgaggtggttcaatttcaccggcagcgagcacctcttcgatcagtgggatcaattttccggtcagcttcgaactgcgaaaaatatcacggcaggccaggcgcacttctttatcaggttccgccgggtgacgagcagcgatctcaaatgctttgggcaccaccgattcaaatttgatgatatcggcaatgtcataaacaaaagaaagcggcttaccactatggataaaaccgatagctggcgcatatcccgccgccaggatagccgcttctgaaatcccgtacaggcacgatgtcgccgcgctaatacatcggttgacgacatcccccttctcccagtctttcggatcatagttacgaccatgccacttcacgccatactgcttcgccagcaatgcataggtcgcccgcacacgggatccttcaataccgcgcagttgctcaacggcacgacgggcgggcggcggttcgcgaaaacgcagttcatacattttgcgcaccaccttcagccgcaggtcatcatctaacgccagctttgcctgataaagcaacttatcggctcgtgcgccgccgggttgtccggaggaataaacccgcactcccgcctcgcccacccacaccaacagcgttcccaccgtcgatgccagacgcacagccgcatgggaaacccgcgttcccggttccagcatgatacaagcgaccgaaccaacgggaatatgcgtgcggattcccgttttatcgatcagcacgaatgccccatccagcacgtcaatctgaccgtactggaggaagatcattgaggttcgatcttttaacgggatcgggttgagcggcacgaacgtcacgcgtcgtctccaggtttgatcatcatcattccgcagccaaacgcccggcttttaccgaacccctgcgccagacgttgcaggaaaagcgcgggttcgttaatcaccagcacgccggtatagtccacgctgctaaactgaatcatctgccgatctttcccgcgacgtatctgctgctgccgataagcatcaacgctcgcctcgcgcagagtaaagccattttgctccccctggcgcgccaaccacgtcagcgccgcctgctgctgataagaccaaatatcctggctatcaccctgcgttttacgctggcgtttcgcctccatcagcaaatcgtgacgcttgccgtttttgcaaaccgtcggattggcgcgcaggttaaaccgcagcgtctgccccgcgctcagcgttggcgcaaatgggcgagtctgcacgtcaaaaatcgcgctggcggcaggctgttcctgtgagagaacaaaaaagcgaaacgcgccctgtaactcttcgcggcgataaagaaactgccgttccttgctgccgggaaagagatcccataaccactggtgcatcacgtactcgccgcgctccaccagatgcaagagctgtgccggcgaaagctcgctggtgtgcagcgttattcttgagagatacacgcgtcctccttgcggagccacggcccctgattcacgctacgttcaccgaacagccattgctggcggctcaacggcatgtcgcgacgacgtaaaattttgctcgccgttaagccatcgtgttcaccttcccaccagcattcgttctgtaatctggggagaggcagtttcagcgcattgaattgatcctgataccaacgatatgcttcacgcaggacacccgccgcactcccttccagcagttgcggcgcaagcggcaacgccagagggtgacttttgcgccccagatacagcgggaatacaggatgttgtagcgacgtctgaagctgcgccaacgtgtaaggcgcgtccggcgtcgcgctgacagcgatcatccaccaggcgtcggtgtagtagtcgcgtcgggaaatcagcgcgctcagtaattcaggatcctgcaactcttcacggcggctgaagtaacgtgccttacgtacctctttcggcatctgcaccgtgtgataatcccgcgcccagcgcgggttgccactggcgcacagcaaaaattggtaatgacgattgaaggcgtttagccgttcctcctcatcgcggcgaattcccagcgccgcagctaataaccccaacagcgccgagcgcgagggtagctcatggctgtggcgcacttcgcctggcgcatccacgccccaggaggccatcggcccgtgaagctgaaaaaccagatattggctcataagccgccccttacgcgcagatgaagtcaagcacgtcttccatgcttccctgctgattcatcacgtcgaaactggcggtatcagtccgctggccataaaccttattcatattcttatgcagcgatgtaatacgcttaaccgcaacgttcaattggtctgtaccgttgatcggttcataaaacgcggccgccagtgaacgtggttggtcggtgcctttttcggccagcgcccacgaggcataggcacggctggcaaagctgttctgtttgccggtcggcgacactttcagcgccgcttcagtaaaggcgcgcagcgttttgtttgccagttcttcattgtcgttcaggtttttcaccagcagatctttgtcgatgcagatataggtgtaaaacagcgcggagccaaagccggtttcgccgagatggcctgcgcctgcatcttctgccgatgcctggcgtaggtcatccacagcggtaaagaaatcgtcttcgatgatcgtttcgctgacgccgaaggcgtgggcgacctggcaggcggcttccacgttaaaatcagttttcttcgctaacatccggccaaacatggcaatatcgacggccatgcgatcgtgacgtaacagttctgcttcctcttctgttgccggacgtttttcttctgccagacggcgcgccagcgctttcacggcctcaaactcagcagggctgatatgcaccagttgctcggtttcagcattcgtcaactcatctttgggtttcttatcctcttttaccttgccaaagcagttggcgatgttcttgacgtactcaaccgcttttttggcgtcaatgccgctatcaacgaggatttgcgccgcctcacgagcaatgcgaccagtacgaataccaatatggccagctaatgcctgttcaaataactcagatgtacgccaggcgcgtttcaggctctgagaggagatacgcagacgtgttgctccgccaagcaccacggtttttggcgcaccggtatcatcacggttcaggttagcggcggggtaagcggtcagtaaatggagctgaataaacgttgtcataaagatatccctgttaatcttgttcgttatcggtatcgccatcgccggcctggtagtattccagcgcccagcggatacgaagaaattcggttggccgctgctggcggcgatggtggttcagcaagtcattctgctcctggcaccagcagaaaatatcgtctgcaagagaaaacaggttgaccgaaccatctaacagcttcaccgcacgccgtaactggcgcagcagttcatccggcgtttttaccgctaataggtgggagaagcgtaattttgacatcaccggagtgtcgccacctttcttctgtccaagctgcgcagcaaaactcttttgctcatcaataaatttgatatgtgcagccagtgccgctgtgattgccaatgcagtaacattccagggtgctttgtttttccataaagaatgtgtttgcattaacaatgaatgaagcccctcagccaaacaggcatcattcaccgttttactacgtcgtaagctggcacgtaatccacgtttttcttgtagttcctcatgccactgacgcaaagtggctttatcatctttcgtcacaacactcattcagcagcctcctgtttctttgctttggcggcttttgcactttgtttttccgccgatgtcgtaaaatatttcttgcgcgcggtcatgatgcgttccagatcgctgctctcgtaggggttggtaaagacgtgatcatcgaagtaatgacgggtaaacagccaaagttctctttgccatttattcagcctttcgtccggcttgtggccgttttccagatcgtgaatcaggttgagaaaacgtccctgcgtcaggttccagaaatcaatgtcgataaaactgaaatcaccgcgagcacccttcgcatcggcaaaccaggcctctttgagcgcgctgcgaagcaggctcaacaggcgggccgcagtttgcacggccttacgtaaatcagggatcagaccttccgtcatcagcaacgggaagtgatgctcataccagcagcggattttcatattgtcgaaatccgcgccaaagccccagatccccgctttaacgtcagtcagcgagcgggcgttaaacaccttgactacctgcgcgggagattcgtaattcgcttccgtctggttgttctgacttaatcccagccagtcgcgccagataaggccgccgggctgcggtttaacggaaaagaaggcgttttgatcttttaccggggcgcgataaggcgtcagcgggtgccgccagccatcgtagttaacgccgtagttcttgacggtcataaagccaagaagctcatcgctttcagcgccgcaaatatcgcagcaacctgactgtaaggtggcaaaatccaggcggatacgacgcggcatcccccagtacgcctggagtttattgacctgctccggcgtggtaacggcattcgcctgctcgctggtccgcgtcgcggcaagccacgggaaaacggtcgcatcacactggtctggtaaaggcagatccgcagtatcctgcggcatcacgttgagccacagcttgcgccagagcggcgtttgccgctcgccctgatattcctgcaattcaaccagcgtggtcagtggcccgccgccgcgcagcccggtacgatagcctttgccgcccgcaggcgcgttaagctgcaacgagaacagcgccagcgccgcgcagtgcggacaaaaacgttccgttacgccgcgtttgacaaaatgatctttattgaacttcgtggtttgcgcgccaggtatttccggcaacaatgaggcaatagagactttttcgccgcttaacggttcaaaatcctgcataaaagacggcgtttccgcgccaaactgaaaagcgtgttctaacggtgctaatgccttatggagcacatcggcatgcaatccatcaaaccagatatcctcccaatttttgtatcttttcggcgcgatactgcattgcagcaatcccaacagaaactgccaagccgctccctgtaaatctgctcgcgttgcggcgatgtccaccacgttttcatccgccagatcgacgggggccagcttgcccgtggaaccgtctttgaaacggacggggagccagggcgttgttaaaagtgaaaaattgtccatatctgtattcgttattcccccatcatgccaatcaatccctcattcgccgaataaccacaagcggcaaagtccgtcaccacaatcaccgtggcaaaatccttatcctgatgctgttgcgcacaccacttacgcaagggttcgccgtctaatttttcaaactcgtctttatgtttattccaccagctctgacgtactcgcagcacgctcatctcccaggcgtgttcaccgctggcataaggggttacgacgctatccacgattttcgccagccacagcgtgacagactcttccgccagccgcgttgacattttctccggtaaagaatcgctaatttcagcacagtagcccggcgcaaagttaagcagcatctggccggcaaatgcccggtcgcaataaaatttgccttcctgcaattgctcggtttttgcaaatccaaccggcatgttgacatcctcgccgtagaccgactcaatcaacaatcgggcagattgcggcatccgaatcgtcccctgctcacgtaatatgcgctgtgtcagccacatgcgcccatgatcgggatagacataggcgctgttacgcatggcgctggataaccagttctctcgcggcgcgtcatcccactccggagcaagaatgcgcagcactggcgtctctcgctcatcctgcccactctttttcaccagaccgttacgatcgcgaatatgacgctgtagtcgaccggcccgctgaattaataaatccaccggcgctaaatcagagatcatctcatcgcagtcaatatccagactttgttcgatgacctgcgtggcgataatgaccttaccggcacgttgcgcgccgctctgtttgccaaagagattcagcgtctgtgactcaatccgctgacgatcgtaaaaagcaaagcgactatggaagagtaaaaggttttccgtgacgacgaccttactcagttgaagctggcgatagatacgaatcgcatcatcaacggagttacgtatccaggcgatacagtttcctttttccactgcttcacctatacgttcaagacacgcctcttcactatgtagccagccaatatctacgcaacgctcaacctctttgcgtgtatcaacccgctgagaaatcagctctgtttgtgtgacctgagtcagccagggataatcgtcatggcctagcaacggcgcctgcacactacgcctcaccccacgggaaaatgccgccaccagcttatctcgctgctgctgcgatagcgtcgcagataacagaatagtggcgttgccattactggcctgccgttcgatcaaaccttcaagtattcgggacatccaggcatcacaggcatggatctcatcagccagtaagatcttgttgctaagacccagtaaccgcaggttgttatgtttaaatggcattaccgccatcatcgcctgatccaacgtgcctacgccaacctccgccaacaacgcttttttattgctgtcggcaaaccaggcggcgcatccctgactataaggctgcgcttcatcgggttcttccgtaccagaaagagtgaccgaccatattgactgattgaaacgatccattaagcgacgcgcgctatgcgccagaatcaggctgggacgggagtccggctgatacagcgccagccaggtgttcgccatacgttcaaacatcgcgttggctgtcgccattgtcggcagtccaaaatagagtccctgcgctttacctgccgccatcagtcgatgagctaatatgagcgccgcctctgtttttccggccccggtgacatcttcaagaataaagagttgggcgccatccacgttgatatccagctcaagcgccttttgttgtaacggtgtgggatgctgaataaaagggaaaagcgtttctatgcccgtaaaggcagacacattcgccgctgagggaaatagcgtgatggcagtttgtgctttagcgagagcttgctgccagtaggtatcaacaggcattttttccgcagtacgcggaaaataacggctggcagaaccagtccagtcagccagtacaaccgcagcggaaataaaccaggaaagttgctgaaattggtcgataccctcatcttcatcccaggcttcaggcaaagtaattaaaggaaagagcgcttttattctcagaagaaaatctcttgccgcgtctttatcctgctggcgaaaatggtccagctcctggattgcctctggagggcgtccatgatgacctgtagtgactggcatccaaagcgccataacgcgcttacttttacgaactgaaagcgaagaaggaggaaacaattcagggcattcacttagccaggagttccacaacatgtatcccagcgtggtatgcgcgattttttcataatgccgtgtaggctcattaaagatatttaaagcctcatgacggtatagttgctggaaggaatgagcaaactttccaatatcatgccaacataaaatccaggcaaaaaattgcgccgcctgctccttatcctggatgcctaatttttttagatagtggtcaataaaataaatattatttatcaccatccagtaacccacagccgcaacatctaaagaatgccagcaaagcaaatggtaatcatcaccgccgtcagtttctcctcgtcgagactttccccaatagtgatatatcgacacgtaaactccagcatgtggataataaaagcactctacgcctttttaatggtcttttttgttgatatacctcacaaaaattgcacttcctgagattatatttaaatatgcccgctcaattttatatattcttcagaaatatttaccccacgaataattattataaatttttccgcctttttcttctggaagaagcgctcaaagaggcttcctccaatgccttctgcataaaccaaaatttaaaaaaaacgaccatttgcggcgaatcatctaccttttgtctgaattatcgtcaccacaaaggattaccaaccataaatgtgctgtattaataatgtcgttcaaattctctcctgtagtaaactttatctgtttaataaaaaagagagaattgaacgatatattttactccggatattgaataatataaatttgaaggaaaatattatgccagtcactttaagcttcggtaatcatcaaaattatacgcttaatgaaagtcggcttgctcatctgttaagcgcagataaagaaaaagcaatccatatggggggttgggataaagtccaggatcattttagagcggaaaaaaaggaccatgcgctggaagtgttacactccatcattcacgggcagggccgtggtgaacctggagagatggaagttaacgtagaggatataaataaaatttacgcctttaaacggctacaacatctggcctgcccggctcatcaagatctgtttactatcaagatggacgcttctcagacacaatttttacttatggtcggcgacacggtgatcagccaaagcaatattaaggacatccttaatatatcagatgatgcagtgatagaatctatgagtagagaggagagacaattatttttacaaatatgtgaggtgattggttcgaagatgacctggcacccggaattacttcaggagtcgatttcaactctacgaaaagaagtgacgggaaatgcacaaatcaaaacggcggtttatgagatgatgcgtcccgcagaggctccagaccacccgcttgtcgaatggcaggactcacttactgcagatgaaaaatcaatgctggcctgtattaatgccggtaactttgagcctacgactcagttttgcaaaataggttatcaggaggtacaaggtgaagtcgcttttagcatgatgcatccgtgcatctcctatttactacatagctattcaccgttttcagagtttaaaccaacaaattctggttttttaaaaaaacttaatcaggattataacgactatcatgcaaaaaaaatgtttattgatgtaattcttgaaaaactatatctaacccatgaacgttctttgcacattggtaaagatgggtgcagtcgtaatatattactgacataaagatagtcagtaatataaccaatttaaaatccggctgcctgccggatttttcatagcagcaagtataatcataccgcgtaaggacaattacccttcatgcagcccgcactcgcgcttcagcccgaagaagcgtgtctcttcttccgccatacccggctcccatttgcgggtggtgtgcgtatcgcccaccgacagatagccctgatcccacagcggatggtatttcaggccatgcttttgcaggtactggtaaacggtgcgattatcccagtcgataatcggtagcactttaaacacgccgcgctggatagcgagaacgggtaaatgcgcgcggctgccggactgctcgcgacgcagacccgcaaaccacgtctgcgctttcagctcttttagcgcccggttcatcggctcgactttgttgatctcattgtatttctcaatgccctcaacgccctgctcccacagcttgccgtagcgcgcttcctgccaggccggactttcgcccgcgcggtaaactttcaggttgagtttgagtttgtccgttagctcatcaataaactggtaggtttccgggaacaaatagccggtatcggtgaggatcaccgggatatccgggcgaatctggttcaccaggtgcaggctcaccgccgcctggatgccaaagcttgaggagagcacgtattcgccgggcagattttccagcgcccaggccacgcgttcttcggcgctcagtttttccagttgggcgttggtttccgccagagccattacgcgatcgacttttggcaattcattcaatgcgttgagatcgagttgggacatgagttcctcactgtttgccttgcctgatggcgctgtgcttatcaggcctacacagacgccatccggcaattcaggttattcccagaaatcacgcgcgggatcgagcaccgggcgaatgatgcccgcacgcaccgtaaagtcgccgaagccttcacccgcttcacgctctttcgcccagcgcccaatcagttcatccagcgaggccagaatatccggctcggcgatattttctttatacatccgtgggatacgactcccgatgcggttgccaccaagatgcaggttataacgaccaggcgctttccctactaagccaatttccgccagcatcgcgcggccacagccgttcgggcagccggtcacgcgcatcacgatatgctcatcaggaatgccgtgtttttccagaatcgcttccactttgtccgtgaacgacggcaggaaacgctcggcttccgccattgccagcgggcaggttgggaacgacacgcaggccattgagttttcacgctgcggtttcaccgcattcatcaacccgtggtcgcgcgccagcgtctcgatcttcgctttctggctttccggcacgctggcaataatcaggttctggttagcggtgatacggaactcgccctgatgaatcttcgcgatctccagcaggccggttttcagcggacgccccggataatccaggatacggccgttctcaataaacagcgtcaggtgccatttatcatcaatgcctttcacccagccaatcctgtcgccacgcccggtaaactcatacgggcggatcggctcaaatttgatccccgcgcgacgctcgacttccgctttaaatgtctccagtcccacgcgctcaagggtgtatttggttttggcatttttcctgtcggtacggttaccccagtcgcgctgcgtcgtcactaccgcttcggccaccgccagggtgtgctccagcggcagatagccaaactcgctggccgtacgagcgtaggttttcttattaccatgctcaatagacagaccgccgcccaccagcaggttaaagccgaccagcttgccgttctcggcaatcgccacaaagttcatgtcgttggcgtgcagatcgatatcattttgcggcgggatcaccaccgtggttttaaatttacgcggcagataggtctgcccgaggatcggttcttcatcggtggtcgcgaccttctcctgatcgagccagatctccgcatacgcacgggtgcgcggcagcagatgttcggagattttcttcgcccattcgtaggcttcagcatgcagctgagactcgtacgggttagaggtacacagcacgttacggttcatgtcgttggcggttgccagcgcatccagccccaccgagtgcagcatctggtgcaccggcttaacgttcttcttcagaatgccgtggaactggaaggtctggcggttggtcagacggatactgccgtaaatcgtgttatccgccgcgaatttatcgatcgcctgccattgcgtcgtagtaatcaccccgcccggcaggcggcagcgcagcagcatcgcgtggcgcggctccagcttctgcgccgcacgctcggcgcgaatatcgcggtcatcctgctgatacatgccatgaaagcgtatcagcaggaagttatcgcctttaaaaccgccggtgagaccgtcgttcagatcttccgcaatggtgccgcgcagatagttgctttccagcttcatgcgctcggcatcggacagtttaccttcgaccaccagtgggcctggatgtttttcgctcattagtagacatctcgctgataacggcgctctacgcgcagctcacttaaatattcatctgccgattcgaggtccataccgccgaattcagcgatcacttccagcaatgctttttcgacatctgcggccatgcgcctggcgtcgccgcagacataaatatgcgcgccatcattgatccagcgccacagctcggcgccctgttcacgcagcttgtcttgtacgtaaattttttctttttgatcgcgtgaccaggcgagatcgatacggcttaacaccccctctttcacgtagcgctgccactccacctgatagaggaaatcttcggtaaagtgcgggttgccgaagaacaaccagttcttaccttccaccccttccgccgcgcgctgttgcataaaggagcggaacggcgcgatgccggtaccggggccaatcatgatcaccggcgtttccgggttagctggcaggcggaagttatcgttatgctcaataaagacgcgaacttcgccctcttcttccacgcggtcggcgaggaagctggaagcgccaccggcgcgggcgcggccttcaatgtcataacgaaccacgccaacggtgatatgcacttcgctctccacttcagcctgtgcggaggcgatggagtacagacgcggcgttagcggacgcagcaggtcgattagcgcctgagcatccagctgtgccggagagaaacgcaccatatcaacaatgggcgtggtcgcggcgtaatgctggagctgcgctttgtcgcccactaatggcaacagcgactcactgcgcgtcagggtcgcgtagttctcaacaatgttggcggtattcaccgtcagctcgaagtgccactccagcgcttcggcgagcggcagggttttaccgtcaaccgtcaccggctcatcgcccttcagccacagcaactcaaccagctccttcaccagagccggatcgttctgataccagacgcccagcgcatcgcccggctgatagcgcaggccggagtcgcctaaatcaatctcaatatgacgcacatctttttccgagttgcgaccggtgattttctgattcacggagagggtcgcgatcagcggcgcgtctttagtataggggctggtgtggatgtcgtttaccgcgccagtagcgacggattgcgaaggtgccgcgacaggtgcgcgagacttcagaacatcaaccacgcgggcgcgccattcgctggcagctgcctgatattcaacgtcagcatcgacacggtcgagcagacgttcaccgcccagttccgccagtttgctgtcgaaatcttttccggactggcagaaaaattcataagaggtgtcgccgaggctaaacacggcaaaagcggtgttttccagtttcggcgcttttttggagaacaggaatttatgcagcgcgacggcctcttccggcggctcgccttctccctgggtggacgtcactatcaccaacagtttttcactggcaatctgtttgaatttgtagtcgccggcgttcaccagtgtcacattaaggttggccgccagcagatcatcacgcagcgcttccgccacacgacgcgcattgccggtttgcgaagcggagataagcgtaacccgcggcatcttccgctcaggaacaggcgtgacggcaacagcgcctgagcgcgggttcagtacgccccaaaaatagccggagacccaggcaagctgttcgggagtaaggtcggttgtcgcggcctgaaggcgcgccagttgctccggattaagcggaagcaacccagtcagtggagccggtgtcgtcatgcgtcgttatgttccagtaagcaaagcggatctatacacaaaatcattcaagttcgccgtaagctgatcgcgccccaggagcgtacataaatacgtgactggggtgagtaaacgcagtcaacacagatgcggcttgaaagatgaaatgtataagcgataaatcccaaactgaggataaggttaacggtgagaggaataacaattaaagaagggttggaaataacaaataaccaaatgaactaacctgttttagttatcgttattaacgccaaaatcgattttataattgattgataattattaaattttctggaaattcttaaattaattgcccgtcacaaggcggagaatggttttagttaatgataaaaaatgcgctttccggtaccctacggcggtttttttattgcctgagagttcatcatgtccaccacgttgtataaagatttcacctttgaagccgctcaccgcctgcctcacgtgcctgaagggcataagtgcggccgcctgcacggacactcgtttatggtgcgtctcgaaattaccggtgaagtcgatccgcataccggttggattatggatttcgcggatctcaaagcggcgtttaaaccgacttacgatcgtcttgatcactactatctgaatgatattccagggctgtccaatcccaccagcgaagtgctggcaaaatggatttgggatcaggttaagcccgtcgtgccgctactgagcgccgtgatggtgaaagagacctgtacagccggctgcgtctatcgcggcgaataaggtttattaacgcgtgggctggatgtcaaattgattccagcctatccacacgacgtttcatcagtgaaaacagtccagcgcgtggtgttaaaagcgcagtacatcaccggttgcaggtgcggttatttccggtagccacaaccgcccccaggcccctgtacagtgacaaccgcatagtttttcaggtttatgttcttgcagaaagcgcctgactcgccacagcgtgaacggtgatgcgcagcggagatgaaatccgccgacaagcgcgtaaatccgctttataccagtaatattctgacagtgccggacaatatttgcgatcccccgatgcccgcatcccgtaatgatgactaatccttttgtcgattggtaaatcagtacgccctcatccaaaatagagtccggctccgcatcgtggccgccaaaaatgccgtaggcttcaggcgcgaccaccggtatttcccctgaccagataaagttttcgccaatcggcagggggtcacgcgtgtacatcattcgatagcgtgaatagtccacctcacacgacaatttttttatttttcgggtaataccaagaaaagtcattgctgcataacgttcacgtgcaatatcgggatggcagatgattcgactgctatcaggaagccacggcacgccgccgcaatgatcgtaatgaccatgcgaaagcaccacagcagacacatcggacaggtcgatccccatcgccaacgcgttttgcataaaactgccatcagggccggtatcgaacaagatagacgtagactcatcctcgaccaacaggcttaaccctggccggaccttcaacgatttatccgctccagctcccttatgattttcgagcaataccctgatccttaacgccatggccttctcctgtctaaaagcctccccgggaaaacgcggcctttttactttacaggtttgtagctgccattactggtacacagattatgattatgcaacggctatccttgttggcgcggggaacacatcttcatattgcgtgacgctgccgatgaacgcggtttatccccgctggcgcggggaacactctttatcagctaaccatttccagaactcgtccggtttatccctgctggcgcggggaacactataatatgaattaatttttgcgcataacctgcggtttatccccgctggcgcggggaacacgcagcttagcgacgaaattaaaaccgaactcaccggtttatccccgctggcgcggggaacactgccagtgactacagaagcgtctctatcggggcggtttatccccgctggcgcggggaacacaccgataaacaaccgcatagcctctttcgtttcgatttatccctgctggcgcggggaacactgctcaataacgtcgtaaatagcgtaagctggcggtttatccccgctggcgcggggaacactatttcgccttcggcactgacgtcaccgtcaacggtttatccccgctggcgcggggaacacgtcgcgttcgttgccggtatagaccagcgtcacggtttatccccgctggcgcggggaacacatcgaatcgaaaccccagccacagaaataattcggtttatccccgctggcgcggggaacacatcgaatcgaaaccccagccacagaaataattcggtttatccccgctggcgcggggaacacgctcatgtcaaacgccatcagcgttccggcatcggtttatccccgctagcgcggggaacacaatcgccagcctcggaaatattccatcctccgcggtttatccccgctggcgcggggaacacaggaactaaacagcctgaccgttgaggatctgcggtttatccccgctggcgcggggaacacaccggacaaatcttttttttcctgttcctgttcggtttatccccgctggcgcggggaacacgggcactatgaacggatcggcgctgatgccggcggtttatccccgctggcgcggggaacacggtaaagccacaccattttttattgacctcgccggtttatccccgctggcgcggggaacacctaggaggcgtaatgaatactacgtatcaaaacggtttatccccgctggcgcggggaacacgtggtggcctcaaataaattcgagcgctggagcggtttatccccgctggcgcggggaacactcgacgtggacgaggagttactcaaccgctgccggtttatccccgctggcgcggggaacacaaatgaccaaatcagaaatcttcaccaaagcccggtttatccccgctggcgcggggaacacgatgtaactgatagcgaaatatattgggataacggtttatccccgctggcgcggggaacacactaaacggatataattgtttataaactactttttgtcagcaccacattctaccaacataatcgcaacaatttaaattattaaagaacagctaatttgctgattttgatgcaaaaaagttcatagaatgattttttctttaaatttaccaaaatagcgtgatccgtgcatcgctatggaaaaatttatcagcgcttttatacactcatcgaaattcacatagagaaaataaacaatgcaaggtaatggatgagtcacagacggcatcggcaggccgtctgtaagattagtaatgcatcaggcgatatttaaatatttatgcgtttgcatagacagccgccagttacgtgcaatacacgtttcaatacacagacgcgtcgcgtcttctttctggctaatgggctgcaaagcaatcacacgcggtttatcatcgctcaacgtggctaacagttcatccagcgcctcaatatcacgaactcgcccaacgggatgcttgatttcattggcgcgctccagcgcctgggaaagcacgtcatatcccccgcgcatattcacttttggtgaaaccgtgacccaggtgttaggcgtacagcgcacttcgtgcgtcccgctggtttcaatctgacaactaaaaccactcttttcaagcagatcggtgagcggcatgaggtcgtgaatacagggttcgccaccggtgatgacaacgtgacgcgcggtatagccctgacgattaattactgccagcaagtcttcactgctcgcagcaccccatttgtcgctctctttggtttttgccagaatgctgaacagagacacttcccgatcgctcagtttatcccaggtatgcttagtatcacaccaggcacagccgaccggacatccctgtaaacgaataaaaatagcggggacgccggtaaaataaccctcgccttgtagggtctggaacatctcgttaatcgggtactgcatagcgttctctattaaggggataatcgttaattattgcagatttcgtctgcccggtcatgcacagcggctgcgctattgaacagatacaaaaaaacccgccgaagcgggtttatacgttaagaggtaaaagcaggattacgcctggcctttgatctctttacgaccgttatacggtgctttttcgcccagagcttcttcgatacgaatcagctggttgtatttagcaacacggtcagaacggctcatagaaccggttttgatctggcctgcagcggtaccaacagccaggtcagcgatggtagcgtcttcagtttcgccagaacggtgagagatgacagcagtatagccagcgtctttcgccatcttgattgcagccagagtttcggtcagagaaccgatctggttgaatttgatcaggatggagttagcgatgcctttctcgatgccttctttcaggattttggtgttggttacgaacaggtcgtcaccaaccagctggattttgtcgcccagtactttggtctggtatgcaaaaccgtcccagtcagactcgtccagaccatcttcgatggaaacgatcgggtactgtttggtcagttcttccaggaagtgggtgaattcttcggaggtgaacgctttgttgccttcgccagccagaacgtatttaccgtctttgtagaattcagatgctgcgcagtccatcgccagggtgatgtctttacccagctcgtaaccagccgctttaaccgcttcagcgataacagccagcgcttcagcgttggaacccaggttcggcgcatagccgccttcgtcacccacagcggtgttcatgcctttgcctttcagcacttttgccaggtgatggaaaacttcagaacccatacggatggcttctttaaccgttttcgcgccaaccggctggatcatgaattcctggatgtcgacgttgttgtcagcgtgctcgccgccgttgatgatgttcatcatcggaaccggcatggagtatttgcccggcgtgccattcagttcagcaatgtgctcgtacagcggcatacctttagcggcagcagcagctttggcgttagccagagagacagccagaatggcgtttgcaccgaagttagatttgttttcagtaccgtccaggtcgatcatgattttgtcgatgccagcctggtctttagcgtctttgccaagaatagcctgagcgatcgggccgttaaccgcgccaacagctttggttacgcctttacccaggaaacgggatttgtcgccatcgcgcagttccagcgcttcgcgggaaccagtagaagcacctgacggagccgccgccatacctacgaaaccaccttccaggtgtacttcagcttcaacagtcgggttaccacgggagtcgatgatttcacgaccgatgactttaacgattttggacattaggttttcctcaagtcactagttaaactaaaacttcagacaaacggtgcaccgctgagggtgcaccgccgttctaacttttttacttcgcctgacgtttctgatgctcgttggcggctttaacaaagccagcgaacaacggatgtccatcacgcggcgtggaagtaaattccggatggaactgacaggccacgaaccacggatgattcggtacctcaatgatctcgactaactgatcatcaccggaacggcctgcgacacgcagacccgctgcttcaatttgtttcaacaacatattgttgacttcgtaacgatggcgatgacgttcaacaatcgtcgacgcgccgtacaactgacgtaccagactgtcatcgctaagctggcactgctgcgcgcccaggcgcatggtgccgcccagatcgcttttctcgctacggacttcaacgttaccgtcttcatcgcgccactcggtaattaacgccacaaccgggtacttacagtctggcacaaattccgttgagttggcgttgtccatgccggccacgttacgagcgaactcaatcaacgcaacctgcatccccaagcaaatgcccagataaggaatattgttttcacgcgcatagcgcgcagtggcgattttaccttcaacgccacgatagccgaagccgccggggatcaggatagcgtccaaatctttcagaatttcgacgccgcgcgtttcaacatcttgcgaatcgatcaatttgatgttgacggtaacgcggtttttcagaccaccgtgtttcagcgcttcgatcaccgacttataggcatccggcagttcaatatatttgccgaccatgccgatagtcacttcgcctgccgggttcgcttcttcgtaaatgacctgttcccattcagacaggttagcttccggacagttcaagctgaatcgtttacaaatataatcatcaagcccctgagatttcaacaggcccggaattttataaatggaatcgacatctttcattgaaataacggctttttccggcacattacagaacaatgcaatttttgcacgctcgttggcaggaaccgcgcgatcggaacgacaaatcagaatatcgggctgaataccgatagacagcagctctttcacggagtgctgagtcggtttagttttcacttcgcccgcagccgccaggtaaggtaccagcgtcaggtgcataaacagcgcgtgttcacgaccgatatctaccgccaattgacgaatcgcctcaagaaacggcagcgattcgatatcaccgacggtaccgccgatttccaccagtaccacatcgtggccttcgccaccttccagcacgcgctctttaatcgcgttagtgatgtgagggatgacctgtacggttgcgcccagatagtcgccacggcgttctttacgcagaacgtcggagtagatgcggccagtcgtgaagttgttgcggcgagacatcttggtgcggatgaaacgctcgtagtgccccaggtccaggtcggtttcagcgccgtcttcagtaacgaacacttccccgtgttggattgggctcatagtacccggatcgacgttgatgtacggatccagtttcatgatggtcacgttgagaccacgggcttccagaatggctgcgagggaggctgcggcaatgcctttacccagagaggatacgaccccgccggtcacaaaaatatagttcgttgtcatgcggaacctgagaagttaggtttaaaagacgatggaataaccaggacgggaaagcagtatacccgaacatgacctacgccacaaactttcattattcctcctcttcgtcaggctgacattcacacagggagggagaaaatagcccctttgaggtaaatgtttttgacgtaaatcaagcgcttgttatttaaaaaatcacacaaatcgctcttgaccgcctaaaacctttagagatcaatttcctggcgttttacttcctgccaaacttcttccattgtttccaggtccaccccggtcatttccaggcctctggctgcgacaatacgttcaacttcgcgaaaacgacgttcaaatttatcgttcgctttttgcaaagcgagctccgctttcgtacctaaatgacgcgccatgttgaccgtggcaaagagcaaatcgcccatttcctcttccagtttagcctgatcaacaaccgcctgccgcgcctcgaacatcacctcatcgatctcttcatagaccttatcgacgaccggtcccagcgtcgtccagtcaaagcccacgtttgaacaccgtttctggattttttgcgcgcgcattaaggccgggaagctgcgcggaatatcgtccagcgcggaatgctgcgctttttgcgcgcgctcttccgttttgatttgctcccagcgaactaatgcttcttcgctattatccgcggaaagctcgccaaaaacatgcggatggcggcgctccagcttgtcgctgatggcagcgcagatatcattaaaatcgaagcggccttcttcctgcgccatctgcgcgtaaaacaccacctggaacaacaggtcgcccagttcgccgcgcaaatcgtcaaaatcctcacgcgcaatcgcatccagtacttcataggtttcttccagcgtataaggcgcgatgctggcgaaggtctgctctttatcccacgggcagccgttttccgggtcgcgcaggcgctgcatgagggtgagaagacggtcaatttgatggttagttgtcatggtttttaatcggttgtaaataccagcgacaattgtaacgtattattcttaaccattcacgcacagagacactacgacaacgcctatataataaaatatattgttaacaggtgttgaatgctacctttcccgtataactttaaaattattaatcgatacacaacaatataataatcatataactaatttattaaaaaaacagatatttgcaccagacgttataaataacatcaattaagtaaaaaaatcatgcaaacactataagcaccccacccaaagagccttccctttcaaaaaaaataaattatttcacttttacggaaaaacgagtagcatgcacgccagtttaatattcaaaaaagaccgcttttttgttttttctggaacatacatgaaataaatatattgaaagtattacatataatattctatgagcaggtacgatcattcagctcataagaatatactcatagaaatgtagaaatataatatttttattatgacctatttttacccaaagcccgcagcatggctctatgccgcatatcccttggtatacgcgtacaaaatgttgccataaaacacgttaattaaggataacacgatgaagtcatctcatttttgtaaactggcagtaactgcatctttagttatgggaattgtctccggcgctcaagccgcgggtagcaacacagcaaaggtcactttccttggtaatattgttgattccccctgctctctcacacttgttttttagataaaaaggctataaccaatttacatgcttaccagcatcctgattctggctcagaatacgtatcacgataacttccgtaactgattgtataaaatagataatatgccttttaaacggtaaggcataaatgtattcacccagttcaggtcgaggcgtgccaatgttattggcactcataatgctgaatatttctgatagatgattaatatatcgatcggcctgtatttcgccaaaatgctgccagccgtaatgccagatattttccagatcttcactggcctttggcgttaattttaccattctcatcgggtttgatcatccctgttttgaccttccgtaaaaaggcatccttttcccaggcctgcggctctccgctgttcagaccttcagccagaagttcacgtaacgcctgaagtcgtgactcggcctgtttttccctcagcagacgaagagactctctgatcacttcactttgtgttctgtaatcacctgattctatgagcgattcaataaactcgcgcagttcatcgccaagatcaacggtcattgttctggccataacagcctccactgtaagtataaatcttacataagagtacaccggaaatgaaatgtacgtcaaaaacataccccatatctcatgcttatggggttgctaatgcggctttgctgaacgagtagcaaagccgctacatgattactgtctggggtttaccccccgtgcagtcgccgtgcatcaatcacatccggcacctggttcagcttaccgagcacccggcccagcacctgcaggttgtagatctcgatggtcatatcaatggtggcgatctgctgtttaatgtcgctgcggctggcgacgcccagcacgttgactttttcgttagccagaatggtggtgatatcgcgtagcaagccgctgcgatcgttggcctggacgcgcaccaccagcgaatatcccgccgagtagctctcgccccataccgcctctacgatccgctccggcgcatgggagcgcagttccgccagctgttcgcagtcggcccggtgcacggaaatccctcgcccttgagtaatgaagccgacaatttcatcccccggaatcggctggcagcagcgggcgatgtggtgcatcaaattacccacgccttctaccaccacgcgcccgtcgtctttacgacgattttgcggcgcgtatgttttttgctgaagctgtttcagcgccgctgcatcctgctcctctgcactcggcttattgaactgtgattgcaggaaattcaccatctgattaagacggatatcgccgccgcctatcgccgccagcaactcttccagctcattaaagttgtagcgcggcagcagatgtttttcggcctctttcaggctaatccccaaatgcgccagctcatcgtcgaggatctgccgtccagcctggatatttttgtcacgatcctgcttgcggaaccaggcgtgaattttcgagcgtccgcggctggtcgtcacatagcccaggtttggattcagccagtcgcggctgggattcggctgcttctgagtgataatttcaatttgatcacccatctgcaactgataggtgaatggcacaatacggccgccgattttagcgccaatgcagcggtgcccaacatcgctgtggatgtggtaagcaaaatcgagcggcgtagatccggcaggcaagtcaaccacgtcgccttttggcgtaaaaacgtagacccgatcgtcaaacacctggctgcgcacttcatccagcatttcgccggaatcggccatctcttcctgccaggcgatcagcttacgcagccacgcaattctgtcttcatgaccggagcgcacgccgccggacgcggcgccttctttatacttccagtgtgccgccacgcccagttcggcgtcttcatgcatctgtttggtacggatctggatctcaacggttttaccgcccggtcccaggaccacggtgtggatagactggtaaccgttcggtttcgggttagcgacataatcatcgaattcatccggcaggtgacgatagtgcgtatgcactatccccaacgcggcgtagcagtcctgcagacgttcagcgacaatacgcacggcgcgcacgtcaaagagttcatcaaacgccagatgctttttctgcattttgcgccagatgctataaatatgttttggtcgtccgtagacctccgcctgcacgccttcgtttttcatttcggcgcgcagatgtccaacaaactcttcgatgtaatgttcgcgatcgagacggcgctcatgcagcagtttggcgatgcgtttgtattccgccggatgcaggtagcggaaacagtagtcttccagttcccacttcagttgcccgatgcccagacgattggcgagcggcgcatagatgttggtacattctttcgccgccagcacgcgctcatcttccggcgcctctttcacttcgcgcaaatgagcgattcgctcggccagtttgatcaccacgcagcggaaatcatccaccatcgccaataacattcgacggacgttatcaacctgctccgaagaaacagagtcgttatgagtggcgtttagctgacggatcgccgccatatcgcgcacgccatgaatcagggtaacgatagatttgccgacgctttcgcgcagtacatcttcgctgactacgttggcgtcggccagagggaacagtagcgccgcccgcagcgtgtcgatatccatactcagcgtggaaagaatttctaccatctccacgccacgccacagcaacagatccgcatccggatgtccttgtgtctgttgcaggcaatacgcccaggtttcggctaagcgctcacacgactgctggctggaaattcccaggcttgcgatccacttcttcggatcaaattcaccagctttattaatatgtgcacttcttaccgcgaccatcgtcctctccttaagggaccaggcctaccgaagtcggtaagccggtaatcattacatgcgctcgaacagaaccattgattccagatgtcctgtgtgcgggaacatgtcgagcatcgctaaacgcgtaacctcatatcccgcattgaccagcgcttcactatcgcgcgccagcgtcgccgggttacaggatacataaacaatgcgaataggttttaattttataatatgtcgcatcactcctgtagcccccgcacgcgcaggatcgagtaagactttgtcaaagccgtttttcgcccacggctgcttcgtgacatcttcctccaggttctcatggaagaatgtcacattatgtaaaccattgcggatggcgttttcacggcctttttctaccagcgccggaacgccctcaaccccaatcacgcttgccgcgcgcgttgccagcggcagcgtaaaattccccattccgcagaacagatccaggacacgatcctcggcgcgcacatcaagccactccagcgcgcgggcgaccatttgctggtttaccgcctcattaacctgaataaagtctcgcggactgaaggctaaacgtaagccgtgcgaatcataccagggcgcctcgccagataccgtttccagtatctcgctaaacggcgccagaaacagagacaatccctcagaatgcgaaaagcgttccagtttttctttatccgccgcacttaatggcgcggtatggcgcagaatcatcagcgtaccgcttcccgcctgtaccagctcaacatgcccaagatgtcgggtgccgtgtaaactcgccagacacgccctgattcggggcagcaatgctgcaagctggggcgccaaaacggggcactgttcgacattgacgatatcgctggaacccgctttgcgaaatcccatttgcagcggtttatccggcgggcaattcagacttaaccgcgcacgacgccgataaccccaaggcgcgccggcgatgatgtcattcacctcgtgtttcatcaaacgcgccagcgccgcgcttttgctgcgttgttgcagggcgatgctgacatgctgttgctgacaaccgccgcagacgccaaaatgcgggcagcgcggcgtttctcgttccgggctatcattcaaacggcgcgaaacgcgtgcgcgggcaaattgctttttatcttctgtaataatgacttctgcgctttcctcaggcaataaaccggggataaacagcgcttttccgttatgacgggctacgccctgaccaaatgaatcgaggtcattgactttaacggttatgatctgacgcgtcgtcacgcgccgttttgcagagtagaattgcgccatcgaccagctttttctcaatttaacagtgtgaccctaattgtcccataacggaactccatgaccaactacagcctgcgcgcacgcatgatgattctgatcctggccccgaccgtcctgataggtttgctgctcagtatcttttttgtagtgcaccgctataacgacctgcagcgtcaactggaagatgccggcgccagtattattgaaccgctcgccgtctccagcgaatatggtatgaacttacaaaaccgggagtctatcggccaacttatcagcgtcctgcaccgcagacactctgatattgtgcgggcgatttccgtttatgacgatcataaccgtctgtttgtaacgtctaatttccatctggacccctcacagatgcagcttcccgccggagcgccgtttccacgtcgtctgagcgttgatcgccacggcgatattatgattctgcgcaccccaattatctcggagagctattcgccggacgagtcagcgattgctgacgcgaaaaataccaaaaatatgctggggtatgtggcgcttgaactggatctcaagtcggtcaggctacagcaatacaaagagatttttatctccagcgtgatgatgcttttttgtattggcattgcgctgatctttggctggcggcttatgcgcgatgtcaccgggcctatccgtaatatggtgaataccgttgaccgcattcgccgcggacaactggatagccgggtggaaggatttatgctgggcgaactggatatgctgaaaaacggcattaattccatggcgatgtcgcttgccgcctatcacgaagagatgcagcataatatcgatcaggccacttcggacctgcgtgaaacccttgagcagatggaaatccaaaacgttgagctggatctggcgaaaaagcgtgcccaggaagcggcgcgtattaagtcggagttcctggcgaacatgtcgcacgaactgcgaacgccgctgaacggcgtcattggctttacccgcctgacattaaaaacggagctgaatcccacccagcgcgaccatctgaacaccattgagcgttccgcgaataatctgctggcgatcattaatgacgtgcttgatttctccaagctggaagccggtaagctcattctggaaagtatcccttttccactgcgtaatacgctggatgaagtggttacgctgctggctcactcgtcgcatgataaagggctggagttgacgttaaatattaaaaacgacgtcccggataatgtgattggcgacccgctgcgcctgcaacaggtcattactaatctggtgggtaatgccattaagttcaccgagagtggcaatatcgacattctggtagaaaagcgggcgctcagtaacaccaaagtacagattgaagtgcagatccgcgatacggggatcggcattccggaacgcgaccagtcgcgactgtttcaggcgtttcgccaggccgatgccagtatttctcgccgtcacggcggcaccgggcttgggctggtgattacgcaaaagctggtcaacgaaatgggcggggatatctctttccacagccagcctaatcgcggctcgaccttctggtttcatattaatcttgatcttaacccaaatgtcattattgacgggccgtcgaccgcgtgtctggccgggaaacggctggcttatgtcgaaccgaatgctaccgccgcgcaatgtaccctggatctactgagcgacacgccggtggaggtggtttacagcccgaccttctccgcgctgccgttagcgcactacgatattatgattttgagcgttccggtgaccttccgcgagccgctcaccatgcagcatgaacgtctggcgaaagcagcgtcaatgacggactttctactgctggcgctaccttgccatgcgcaaattaacgccgaaaagctgaaacaaggaggcgcggcggcctgtctgttaaaaccattgacgtcaacgcgcctgttgccagcgctgacggaatattgccagttgaatcaccatcctgaaccgctgctaatggataccagtaaaatcaccatgacggttatggcggttgatgataatcccgctaatctgaagcttatcggcgcgttactggaagataaagtccagcacgtagagctttgtgatagcggacatcaggcggtggatcgggcgaaacaaatgcagtttgatctgattttgatggatattcagatgccggatatggacggcatacgcgcctgcgaattgattcaccagcttcctcatcagcagcaaacaccggttattgccgttacggcacatgcgatggccgggcaaaaagagaagttgctcagcgcgggcatgaacgactatctggctaaaccgatagaagaagagaagttgcataatctgttgctgcgctataaacctggcgccaacgtagcagcgcgcctgatggcgccggaaccagctgaatttatcttcaatccgaatgcaacgctcgactggcagcttgcgctccgccaggctgccggtaagcccgatctggcgcgggatatgctgcaaatgctgattgattttctgccggaagtgcgcaacaaaattgaagaacaactggtgggagaaaatcccaacggcctggtcgatctggtccataagctacacgggagctgcggctatagcggcgtaccgcggatgaagaacctttgccagcttattgagcaacagcttcgcagcggcgtccacgaagaggagctggagcctgagtttctggagctgctggatgagatggataatgtcgcgcgtgaagcgaagaagatattaggctgatattcgccggatggcggcgtgaccgccttatccggcctacaactcagcgtaactgttgccccgctttcagcgttgcagccacgttgcgcgcggtcattcgtacgttttcactcgcattcttcagcgcgtcctccagcgtgcagatggtataaatcacgctgaaaaccgcatcaagcccatgttcatgaaccacgctaacgtccgccgtcaggctacccgcaataccaattaccggcttgttataccgtttggcgatgtttgccacgccaatagggactttaccgtgaatggtctggctgtcgatgcgtccctcgccggtgatgactaaatcagcatccgcaagacacgcttccagatgaagcgcatcggtgacaatctcaatgccacgccgtagctgcgcgccgcaaaacgcgtataacgccgcccccatgccgcctgccgcgccgccgcctgccagatccaacacatcgacatgcagatcgcgggcaatcaaatgcgcatagcgagtcaatgccgtatccaggcgttcaatcatttccggcgtcgcccctttttgcggaccaaaaaccgcagacgcgccctctttgccggtaaggggattcgtgacatcgcaggcgacctctatatggcacgccgacaaacgcttatccaggccgctgatatcaatgctggcgagtgtttccagcccaatgccgccttgcgcaatatcattgccctgcgcatcccgtagcctggcccccagcgcctgtaccatccccgcgccgccatcgttggtggcgctaccgccgataccaataatgatatgctcaacgcccgcatccagcgcatgacggatcagctcgccggttccccatgacgtggtcttcaacggatcgcgttgcgcgggcggcacctgctccagcccgctggcggccgccatttcaatgaacgcggaacgcgcatcgccggaaagcccataaaacgcattgacgcgatgccccaacggcccggtgacctcaacatgcacgattcgacccgccgtcgcttcaaccatcgcttcgacagtaccttctccgccatcagccagcggcaatttcaggtaatcggcgtcaggccagatctcgcgaaatccttgttcaatggcggtcgctacctcaagagcactcaaactttccttatacgagtctggtgcgatcactattttcataagtcgtccttacgcatgttgatcctgttaagcatacacccagagaagaaccggttccttacggaaccggctctgacttaacgcaccatgcaaggacgcttattatcaaacgtccagccaggaattaagtactgcattcccatcgcgtcgtcacgcgcgcctaagccatgtttttgatagagctcatgcgctttcatcacctgatccatatcgagctcaacgcccagacccggtttggtcggtacttgcaccatgccgcctttaatttcaaacggttctttagtcagacgttggttgccttcctgccagatccagtgggtatcgatcgcggtgatcttgcccggcgccgccgcggcaacatgggtaaacatcgccaacgaaatatcaaagtggttgttagagtgcgagccccaggtcagaccgaactcatggcacatttgcgccacgcgtacagagccttgcatagtccagaagtgcgggtccgccagcgggatatcgacggattgcagcgacagcgtatgccccatttgacgccagtcggtcgctatcatattggtggccgtcggtaatccggtcgcgcgacggaattccgccatcacttcacgaccagaaaaaccctgctccgcgccgcacggatcttctgcataggccagagaacctttcaggtatttaccaatgctgatcgcttcgttcagcgaccaggcaccgtttggatcgagcgtaacgcgcgcttgtgggaaacgtttcgccagcgccacgattgactcggcctcttcttcgcccgccagcacgccgcctttcagtttgaagtcgttgaagccgtatttttcataggcagcttccgccagacgcactaccgtttccggcgtcatcgcctcttcatggcgcagacgataccagtcgcattgctcatccggctggctctgatacggcagcggcgtggccttgcgattgccgacaaagaacagataacccagcatttcgacttcgctgcgctgctgaccgtcgcctaacagcgaagcgacgttgacgcccaggtgttggcccaaaaggtcaagcattgccgcttcaatgccagtcaccacatggatagtggtacggagatcgaacgtttgtaagccgcgtccgcccgcatcgcgatcggcaaactggttgcgaacggcggtcaggacatttttatattcacccagcgtttttcccaccaccagtgggatcgcatcttccagcgttttgcgaattttttcgccgcccggaatctcgccaaccccggtatggccggagttatctttaataatgacgatgttgcgcgtgaagaacggggcgtgcgcgccgctcaggttcatcagcatactgtcatgacccgcaaccgggataacctgcatttcagtcactacaggcgtcgtaaattgagtactcataactgtgtccttattcagaattagtgacgaccaaaaacagggcgtttgcggtcaaaagtccagccggggatcaggtattgcatcgggcctgcatcattacgcgcgccgcctggcagctttttatacgcgtcatgcgcttttcgcacctgttcccagtcaagctccacgcccagtcctggcgcatccggaacggcaattttgccgtttttaatttccagcggatttttagtcaggcggcaatcgccctcctgccagatccagtgcgtatcaatagcggtgggtttgcctggcgccgccgcgccgacatgggtaaacatcgccagtgaaatatcaaaatggttattcgaatggcagccccaggttagcccccagtcatcacacagttgcgccacgcgaacggcgccggtgagggtccagaaatgcggatcggcaagaggaatgtctaccgcgttgagcatcaccgcgtgtcccatttcacgccagttggtggcaatcatattggtcgctaccggcagtcctgtcgcgcggcggaactccgccatgacttcacgaccagagaatccttgctccgcgccgcacggatcttccgcgtaggtcagtacatcattcagccctttgcacaacgcaatggcttcatccagtagccaggcgccgttcggatccacggtaatacgcgcgtccgggaagcgtttttttagcgcgcgaacagtatcaatctcttgttcgcccggcagcacgccgcccttgagtttaaaatctttaaagccgtagcgatcctgagacgcttccgccagccgcacgaccgcgtcgctgtccagcgcttcctgatgacgcaggcgataccattcatgactgcccggcgtgctttccagatacggcagatcggttttagtgcgatcgccaatatagaagagatagcccaacacggtgacggcatcgcgctgtttaccgggtcctaacagttcacagaccggcacattaagcgcctgccccagtagatcaagcagcgccgcttccaaagctgccaccgcgttaacccgcagttcaaacgtccatgcgcctttaccaaaggtgtcaaaatcagcagcctggttgcctttatgcacctgctgcaccactttgttcaggcgggcgacttcctggcctaataccatcggaatagcatcgaccagcgtctgataaatcacttctccgcccggcgcctcgccgacgccagtatgcccggcgttatcggtgaggatgacgatgttacgggtgaagtacgcgttatgcgcgccgccgatgttgagtagcatactgtcatgtccggcaaccggaatgaccttcatgtccgtaataacgggactggattgcgttgtcatgataattgtcctgcgacaggtttcagttcaatacgcttaatatcgcctaccagcaccagatagctgatgatggccaccagggcatgtacgccgacatagatcaacgcgccgttgaaggaaccggtggtgccaacgatgtaaccaatcgcgattggcgtcacaataccggaaatattgccgaacatattaaacaagccgccggaaagaccgctgatctctttcggcgcggtatccgccattactgcccagcccaacgcgccgatacctttaccgaagaaggccaacgccataaagccgatgatcatccattccacgttcacatagttacagaacaccatgaccattgacagcaacatccccagcacaatcggcgtcttgcgcgcgatattcagggagccggtacgacgcatcagccagtcggaaatgatgccgcccaacacgccgccgataaagccgcagaccgcaggaaccgaggcgacaaagcccgctttgagaatcgacatgccgcgcgcctggaccaaatagaccgggaaccaggtaataaagaaataggtcaatgcgttaatacagtactgaccgatgtaaacgccaatcatcatacgagagcccagcagctgtttgatctggccccatttgacgctaaacggtactttcgctttggtgtctttctgatccatattgatcagcgcgccgccttctgcgatgtactccaactctttcttatttacgcccggatggttatttggttcatggataactttcaaccagataaagctgatgatgatccctaacccgcccataaagaagaagacatgcgaccagcccacttcgtgcgtcagccagcccataatcggcgcgaaaataaccgtggcaaagtattgcgcggagttaaagatggccaccgccgttcccctctcctgcgccgggaaccaggctgcaacaatgcgactgttgcccgggaaagaaggcgattccgccagaccaaccaggaaacgaagcgtaaagagggcgacaataatgccgaaaccactaaagatatcgacaaaaccctgcaacagggtgaagactgaccaaatgaaaatagaccagaaatagacgcgtttggaaccaaagcggtccagcagccagccgcccgggatctgcccgataacataggcccatgaaaaagcagaaaaaacatagcccatgcctaccggatcaaggccgatatctttggccatttctgagccggcaatggacaatgtggcgcggtcgccgtagttgaaggatgtgacgataaacagcatcaccactatccagtagcgggcgttcgtgcgtttctccgcactgctcgccgcgtgacttaatgaactcattgttgcactcctgaaatttcgcgttagctacgctcactctgaactgcacaaccggtagggaatcagagataacgtttccttgttgcagcttttattaggtcgtttgctttgcacgctgcatgcttttattcactggcaggagaagtataaaaagcgcgccacacacactcaccgtgcaacaacacagtattttggcgatgaattacgcctgtttatggcaaaagcccaggacagtggaagccacttcacggaaatgaaatcagaaggcgtcggcgtcgacgcaggaggagtaaaaagagaagaatgtgaaacaggtcgcttgattacatgaaaacgcccgtaaaaaactgctgcttttgcgggcatatgcacaaagctaacacgattcagttactttacactgtgtacaggtcatgattttgcttactggcaacgcaagcaaacgaaaaggtaccctcccgtaggggggagggatttacctcaggaaagtaaagttccccagttttcaacccagggattggactggctctccggctccggatgttcgctggcgtcaatgaataacatctcccccacccgctgcgcgctttgctcttgcaacagggcatcaaactgtttgccgccattacagaaattggggtagctgctatcacctaacgcaatcaccccgtaacgcaggtttggttgaaaaccgactgtatctttaatgccgtgaaagagcggcgcaatgctatccggtagatcgccctgcccggtcgtcgaggtaacgaccagcgcaaccttatcctgatattgctgccagtcggacagttcaggatcttcaaacacggtcgcgctgtggccctgtctggcgaggatcgcttccgcttcttccgccaccagcagtgagttgccatacatggtcccgacaaaaataccaatttccgccattatgcgtatctccctgaattatgtcagatgagtctcatcctgccgggacgccgccgtaaactcaaccctttcattgtcagggagaagtccacgccagccaaactgcgtcagcgcctgcatccaggtttcatccaacccggcctgaattatcaacggctgtccggtgaaggggtgcgtcagttcaagacgactggcatgaagcatcaggcgacgacaggcaaaatgctctgcggcgctgcggttttgtcgcaaatcgccatgtttactgtcgccgatgataggatgacgcagatgcgccagatgacgacgaagctggtgcttgcgtcccgtttttggttccagctcaaccaggccataacgcgtggtgggataacgcccggtcggcaccgccatttcgaccgtcgccagcccgcgatactgcgttacggccggctggggcgctttatcttcgcgggcgaatttatcggcaattttatcgcgctcttccaccagcggataatccagtaccgcgtcatccatcagccagccgcgcacaatggcatggtagcgtttacggatgtggtgctgctcgaactgctgcgccagacggcgtcccgcttcgctggacagccccattaacagtacgcccgacgtgggcctgtcgagacggtgggcggtaaaaacatgctggccgatttggtcgcgcaccgtttgcatgaccacgactttttcgtcgcgatccagccagctccggtgaacaagccagcctgcgggtttattcacggcaaccagccacgggtcttgatagaggatctccagcatcaggatttatcgcgggcgaatagcgcatccagatcctgcaaaaccgccaggatcgtctcccgctgcggatgatccgccgccagcgccatttcataataaggggcgacggcaaacgcctcgggcagcggctgcgcattatcaagtagggtatgcatacgtgggatcaatacccattgcagccattccagcggttccatggtatccataaaaaatggttgggtgctggtaaacaggtgcgcctgcggcgcatcctgccgccagtggcgatgctcgcgcagcagcgtttcaagcgtatgtaactgctgacgcacacggtcatgagtcgtcatgttaaaaacctcaatgatgaaaatctggcgcgaagaataacaaaaaaagggagcactgtataaacagtgctcccggttcgtttcgcagcattccagctacttttcgtgctccctgctcatccgtgacaacttttcctgtgaccttacggcctgttcatcctgaacgtttgcatcctgcgcacatcgcccgatgtgatagcttcttcctgaagcgtccctggtcatccagacccgccgaacatcctgatcggctctcgttctccgtcctggaggtgtcctttaacgcatcctgcgctttccactttgcttcatcctgaagcctttccttgtaacaccatcctggcgtgtcctgctgaagcgtcatcatcctgacgttcgcttcgttgtacgactccctgtcgacgaagatagaatcgcctgtttcaccttgtcttacaagacgcttacagacaataccttaagtaaattttcatatgaaagtgcgcaaaaacattttaattagttgttttatatagacttacataagaaaacggggctcagtatccgctgatatcctggcgatctcctacagactttgtaagagatctctcacacctgttagggcaaacgattacagaagaggattaagttgcgtaaggaattccgcaagcgttgcggcaagaacggtacgattgcgggtgcccagcgtttctttaatcacctcgccggacagattacagaccgaaatgacctcaagctcattttcctgcgtcgcaataaaaagcgtgggaggaagcttgagccgcttttgcgtgaccaggtggcctatcagattttcctgcacgcgccgaaagtcatcctgactccaggtttgcagtagcgtaagcttttcatccgcaaactgcgcgggcatgtcgccagcaaactgcgtggtgtaaaacgcgtggagcgcaggttgtaccataatatcaaaggcgcgttcaaccgcgtttacattttcttcgccttcaaaaggttgcggctgccagtaaacggcatcgcgggttgaagaaataatgcacggagaaggtacgccatacagttcttcgctcaacggccagctaccgtgtttttcttgccacgcatcgcagtaacgcgtcgtaaaggctttcaatgcctgcgctgtcagttcgtccaccagtttctctcttcataaaagccaggatacacttggcgcatagtgtatctggtttatgacggtgaaacatgtcttcttatgaaaaccatcaggctcttgatggcctgactctcggaaaatcaacggattaccgggacaattatgacgtcagcctgctgcagggcgtaccgcgcagtttgaatcgtgacccgctcggattaacagccgataatttgccgttccacggcgcggatatctggacgttgtatgaactttcctggcttaacagccagggtcttccgcaggtcgccgtcgggcatgtcgaactggattacaccagcgttaatttaatcgaatccaaaagctttaaactgtatctgaacagctttaaccagacgcgctttgacacctgggagacggttcgccagacgctggagcgcgatctgcgcgcctgcgcgcagggcaacgttagcgtgaggcttcatcgtcttgatgagctggaaggacagcctgtcgcccatttccacggcacctgtattgacgatcaggatatcagtatcgacaactaccagtttactaccgactatctgcaacatgcggtcagcggcgagaagcaagtagaggagacgctggtcagtcatctgttgaaatccaactgcctgatcacccaccagccggactggggctcgatacaaattcagtatcgcgggcgcaaaatcgacagggaaaaactgctgcgttatctggtctccttccgtcaccataatgaatttcacgaacagtgcgtagagcgtattttcaatgacattctgcgcttctgccagccggaaacgctaagcgtttatgcgcgctatacccgccgcggcgggctggacattaatccctggcgcagcaataccgatttcgtgcccgccacgggcaggctggcgcgacagtaatttttttgtcaattttgcgtgccggattgcgcatgtaaggttgtgaaaggtcatcagccagggctattgtaatcaacagggaatggcgtgttgcgtcccataaggagtttacttgattacacatattagcccgcttggctcaatggatatgttgtcgcaactggaagtggacatgctgaaacgcacggccagtagcgacctgtatcaactgtttcgtaactgttcacttgccgttcttaactccggcagcctgaccgacaacagcaaagagctgctgtcccgctttgaaaatttcgatattaacgtactgcgccgcgagcgcggcgtgaagctggaattgattaacccgcctgaagacgcttttgttgacgggcggattattcgtgcgctacaggctaacctgttcgcggtgctgcgcgacattctctttgtgaatgggcagatccacaatgccggccgtttccagcatctggatcttgaaagctcaacacatatcaccaatctggtattctccattttgcgcaacgcccgggcgctgcacgtcggcgaagcgccaaacatggtggtatgctggggcggccactcaattaacgaaaacgagtacctgtatgcccgtcgcgtcggcacgcagttgggattacgcgagctgaacatctgcaccggctgcggccctggggcgatggaagcccccatgaagggcgcggcggtcggtcacgcacagcagcgctataaagacagccgctttatcggcatgactgaaccttccattattgcggctgaaccgcctaacccgctggtgaacgaactgatcatcatgccggatatcgaaaaacgcctggaagcgttcgtccgtatcgcacacggtatcatcatcttcccgggcggcgtgggtacggcggaagagctgctttatttgctggggattctgatgaatccagccaataaaaatcaggtgctgccgctgatcctgaccggaccaaaagagagcgccgattacttccgcgtgctggatgagtttattacccatacgctgggcgaagcggcccgccgtcattaccgcatcatcattgacgatgcggcggaggtagcgcggctgatgaagaaagcgatgccgcaagtgaaagagaatcgccgcgatactggcgacgcctatagttttaactggtcgatgcgtattgcaccggatctgcaggtgccgtttgagccgtcgcatgagaatatggccaacctgaaactgtacccggatcagccggttgagattctggcggcggatctgcggcgcgccttctccggtattgtcgcggggaacgtgaaggaggtcgggatacgcgccattgaagctaatggtccgtataaaatccacggcgatcgagagatgatgcgtcgcatggacgatctgctgcagggattcgtcgcgcagcatcgtatgaaattgccgggttccgcctacatcccctgttacgagatctgcgcttaacgcttatgcccggttgccgccagcagccgggcgcttctcccattcctttcattgcggtatggcgattcacgtatgccttcattttttatgatgatcatcagaggcatagcccgcattgttttataaacaccatttataattcaccataaatagattgccaggcaaacgtttacctgactcctcttaccgtgatttatcggctcaaactctcattcttcgcaagaatccactaaaaaccttgatttttatagtcaaacctccgtatcttgcgccccaatctttccggccttatatcgttaatggtagccttcgcgcccggaaattcgttatgacgtttttttaatagattaatggtccaaatttatccatgtaagaagcggattattgcatttgagatcgggatcactgatagattcatcacttaaatgtatctttccgcccgaaaattattacggcgaaaaattatataaaaagcgtccctaagcagatttcattttacgatcaggtcttttttcattggattagaccagcaacctgatttttagcatcctccaggagaaatagatggaaaccactcagaccagcactattgcttcgattgactctcgaagcgcatggcgcaaaacggataccatgtggatgctgggcctttacggcacggctatcggcgcgggcgttctgttcctgccgatcaacgcaggcgtcggcggcatgattccgctcatcatcatggcgattctcgctttcccgatgacctttttcgcacaccgtggtttaacccgcttcgtgctgtccggtaaaaatccgggtgaagacatcactgaagtcgttgaggaacacttcggtatcggcgcaggtaaactgattaccctgctttacttcttcgcgatttaccccatcctgctggtttacagcgtggcgattactaataccgtggaaagcttcctgacccaccagttagcgattaatccgccgccgcgggcgattctttccctgatcctgattgttggcatgatgaccatcgtgcgcttcggcgagcaaatgatcgttaaggcgatgagtatcctggtattcccgttcgtcgctgcgctgatgctgctggccttgtacctgatcccgcagtggaacggcgcggcgctggaaactctgtcctttgattccgccgcgtctaccggtaacggtctgtggatgacgctgtggctggcgattccggtgatggttttctctttcaaccactccccgatcatctcctccttcgcggttgcgaagcgtgaagagtacggtgaaggcgctgagaagaaatgttctaaaattctggccttcgcccacatcatgatggtgctgaccgtgatgttcttcgtcttcagctgcgtgctgagcctgacgccggcagatctggcagcggcaaaagagcagaacatctctattctgtcttacctggcgaaccattttaacgcgccgatcatcgcctggatggcgccgatcattgcgatgattgctatcaccaaatccttcctcggccactaccttggcgcgcgtgaaggctttaacgggatggtgattaaatcgctgcgtggtaaaggtaaatccatcgaaatcaacaaactgaataaaattaccgcgctgttcatgctggtcaccacctggattgtggcgacgctgaaccccagcatcctgggcatgattgaaaccctgggcggcccgatcatcgcgatgattctgttcctgatgccgatgtatgccatccagaaagtaccggcaatgcgtaagtacagcggtcatatcagcaacgtattcgttgtgattatgggcctgattgccatctccgctattttctactcactgttcagctaagtcctttagcgccgcttaccgcggcgcttctctatgatacaaccgcaatggatgccctatgattagcgtattcgatatttttaaaatcggcattggcccttccagttctcacaccgtcggaccaatgaaagcaggcaagcagttcacggacgatctgattgcccgccatattcttacagatgtcacccgcgtcgtggtggatgtctacggctctctgtcattgacgggtaaaggccaccacactgatatcgccattattatgggcctggcggggaatctgccggacaccgtcgatatcgacgccattccgtcctttatccaggatgtgaacacccatgggcgtttactactggctaatgggcagcatgaagtcgaatttccggtcgataagtgcatgaatttccacgccgacaacctgtctctgcatgagaacgggatgcgtattaccgcgctggcgggcgataaggtgctctacagccaaacctactactccatcggcggcggctttatcgtcgatgaagagcactttggtttgacgaatagcgaacccgttaacgtaccgtacccttacaaaaccgccgcggatttacagcgccactgccaggagacgggtttgtcgctctccggtctgatgatgcaaaacgaactggctctgcacagtaaagaagcgctggagcagcacttcgccagggtctgggaggtgatgcgcagcggtattgagcgcggtatcaccaccgagggcgtattgccgggcaaactgcgcgttccgcgtcgcgcggcggcgctgcgtcggatgctggtcagtcaggataagaccaccaccgatccgatggcggtcgtcgactggatcaatatgttcgcgctagcagtgaacgaagagaatgccgcaggcggacgagtagtcactgccccgactaacggcgcatgtggtattgttccggcggtgctggcgtactatgacaagtttatccgcgaagtaaatgctaactcgcttgctcgctatatgctggtcgccagcgcgattggctcgctgtataagatgaacgcctctatttccggcgccgaagtgggttgtcagggagaggtcggcgtggcctgttccatggcggcagcgggtctggccgagctgctgggcggtagcccggcgcaggtgtgcatcgccgcagaaatcgccatggagcataatctggggttaacttgcgatccggttgccggtcaggtacaggttccctgcattgagcgtaacgcaattgcttcagtcaaagcggtcaacgccgcgcgtatggcgctgcgccgtaccagcgaaccgcgcgtatgcctcgataaagtgattgagaccatgtacgaaaccggtaaagacatgaacgctaagtaccgcgaaacttcgcgcggcggcctggcgatgaagatcgttacctgcgattaattctcagcacattttaggatctgtaagccggataaggcgctcgccgccatccggcttttgttgcctgatgtcgcttcgcttatcaggcctacggatagcgctatttcgcaatgctcgcctccccccgccgtgaatgttaccctacgcgcaggtttgtaagggagaacaccgtggctgctcatctgcttatcgtcgacgcgctcaatttgattcgccgtattcacgccgttcagggatcgccctgtgtggaaacctgccaacacgcgctcgatcaattgattattcacagccagccaacccatgccgtagcggtatttgatgacgacgcgcgcagcagcggctggcgtcatcagcgtttgccggactacaaagcaggacgtccgccgatgcctgacgatttacataatgaaatgcccgccctacgcgccgcatttgaacagcgcggcgtacgctgttgggcatcagacggtaacgaagcggacgatctggcggcgacgctggcgctaaaagttaccgaagccggacaccaggcaaccattgtgtcaaccgataaaggctattgccagttgctctctccgggattgcgcattcgcgactacttccagaaacgctggctggacgcgccgtttattgaaaaagagtttggcgtacttccccggcagttgccggattactggggtctggcaggaatcagtagttcgaaagttcccggcgttgccggtatcggccccaaaagcgcgacccagctattgattcagtttcaaaatctggagggaatttacgcccatctggacgaggtgccggaaaagtggcgcaaaaagcttgagacgcataaagaaatggcatttctttgccgcgatattgcacgtctgcaaaccgatttacatatcgacggaaacttacagcagctacggctggcgcggtagttttgttgccggatggcggcgtgaacgccttatcctgcctacaggactgcacgaaatgtagagcggataagcgcagcgccatccggcaaaattaccaggcggtatgatacagttcgacaatgtccgccagactcgcttcacgcggattgccgcccgtacagacatcatcgaacgccgcctgcgccagcgccgggatatcctcttttcgaacgccgacatcacgcaaatgcagcggaattcccacatcgcgatttagcgtaaatacggcttccactgcggcattacgcgcctcttcaaggctcaatccttctaccttcacccccatcgcccgggcgatatcacggaatttctcgttggtagacccggcattgaaacgcatcacatgcggaagcaaaatagcattcgcgacgccgtgtggcgtgttgtaaaacgcgcccaacggatgcgccatcccatgcaccagccccagccccacattggaaaaccccatcccggcaacgtattgccccagcgccatcgcctcaccggcctctttttctccggctacggcgccgcgcagcgcgccagcaataatctcaatggctttgatatgtaatgcatccgtcagcgcccatgcggcccgggtaatatagccttcaatagcatgggttagcgcatccacgcccgttgccgctttcagcgcgggcggcataccgtccatcatatcggcatcgataaatgccgcctgcggaatatcatgcggatcgacacaaacgaatttgcgccgtttctcttcatcggtaatcacataattgatagtgacttccgccgcggttcccgccgttgtcgggatcgccataatcggcacgctgggtttacgggtcggcgatagcccttccagactgcgcacatcggcaaattccggattgttactgataataccgatcgctttgcaggtatcctgcggagaaccgccgccaatggcgatgagatagtccgcgccgctttgggtaaagaccttaagcccttcctggacaacggaaatcgtaggattagggatcacgcccgcatagatctcccacgccagccctgcggcatccattctgcttgtcactttatcgaccacaccgcattgcaccagcgttttatcggtaacaatcagcgctttatgataaccgcggcgcgtcacctcatcggttaatgcgtccaccgctccccggccaaaccatgccgtttcattcagaatcattctgttcgccatcgcctgtctcctgacatcactcttcaatacgtaatccgtaagttttaaatttctccagtacgatagcgatcgcctcgtcatccagtaccggtaccggatcgacaatggccagcgtacttaaatagagctgcgccagcacttccacttcatgcgccagccacaacgctttgtctaaattttcttcacaagcgataagcccgtgatgctgtaacagcgtcgctttacgatttttaagcgccacggcaacatggtcagaaagttcgcgggtgccaaaagtggcgtagggcgcgcagggaatagagtttcctcctgcggcggcaatcatgtagtgaatcgccggaatcgggcgattcaggatcgagactgccgtacaatggacagcgtggttatgtaccacggcattggcgtcagggcgcgtctggtatgccgccatatgaaaacgccactcgctggaaggcagcttgccctgctcatgctgaccgtcagcatcaataaagacaatgtgcgactctgtcagcttctcgtaggggatccccgtcggcgtaatcagcaatccgccctgataacgtacgctcacgttacctgccgtcccctgatttaaccctaaccgcgtcatttccagacaggtatcaataatctgccgcgccagtctatttcgttccattatttacctctctctgtgattcaaaatgagacaacaaaaccgcctttcgcattgcgctgctgtcctgttgaaataatcgaatagttagcaactatcatcatactgaataaagagaagggaatttaaataacgatattttgtgattcacatcaattaattcgccacgataaaccagacgactaccgtttctctcgccgataaatgcccgctcttaataatattttttaaaacgggcaaagatgaagaataagttactactgcccgttttcgtggcaataatttaattcgggcattcagcctgtggttttttaaattaaacatctcaaacggtcattttttatgaaaattaaagtgatgataatcacagaacgctatgctctcaggtataaatgtgaccgccatcatattaaaaggccttttttatttgaaaatgactccatgagttcattccggacgccaatttattaccggtaagaaaagcgaactcacctaattttacggtctggtgaccagaaccgaccgcacgcaaaagcttctgaaccgatgaggatgctatgggaaacacaacaatacaaacacagagttttcgtgctgtggatgcagagcaaagcaaaagcaagcgctacattattccattcgccttactttgctcgctattttttctgtgggccgtcgccaataatctgaatgacattttattaccgcagtttcaacaagcttttacgctaactaactttcaggccgggcttattcagtcagccttttatttcggttatttcgtcattccaattcccgctgggattttgatgaaaaaactcagttataaagcagggattatcaccggactttttttgtatgctgttggcgccgcattattctggcctgcctccgagataatgaattacacattgtttttaattggcctgtttatcatcgccgccggtttaggctgccttgaaactgcggccaacccttttgttacggtattaggtccagaaagcggcggacatttccggcttaatctggcgcaaacttttaactcctttggcgctattatcgccgttgtgtttgggcaaagccttattttgtctaacgtgccgcatcaatcgcaagaagcgcttgataaaatgacgccggatcagcttagcgcctataaacacagcctggtgttatcggtacaaacgccatacatgattatcgtcgccatcgtattagtagttgcgctactgattatgctgaccaaatttccggccctgcaaagtgacgatcatagcgatgctaaacaaagctctttcttatcttctctctcccgactcatccgtatccgccactggcgctgggcggtgctggcgcagttctgctacgtgggggcgcaaaccgcctgctggagctatctgatccgctacgccattgaggagatccctggaatgacgcccggtttcgccgccaattacctgaccggcacgatggtgtgcttctttatcggccgtttcaccgggacctggcttatcagccgcttcgcgccgcataaagtgctggccgcctacgccctgtttgccatgctcctgtgtctgatttccgcctttagcggcggacatatcggcctgctggcgctgacgttgtgtagcgcatttatgtcaatccagtacccgaccatcttctcgctgggtatcaaaaatctgggacaggacactaagtacggctcgtcttttatcgtcatgaccatcattggcggcggtattgtcacgccagtaatgggcttcgttagcgacgccgcaggcaaaatcccgaccgccgaactggttccggcattgtgctttgccgtcatcttcatttttgcccgtttccgttcacaagcggcgacaaactgaacatttatccgaataacgtgaggaatctgtcatgaaaaaaatcagcttaccgaaaatcggtatccgcccggtgattgatggacgtcgtatgggcgtacgcgagtcgctcgaagagcaaaccatgaacatggcgaaagcgacggcggcgctcatcaccgagaaaatccgccacgcctgcggggctcaggtggagtgcgtcattgcggatacctgtattgccggaatggcggaatccgccgcctgtgaagaaaaattcagtagccagaacgtgggcgtgaccattaccgttacgccgtgctggtgctatggcagcgaaaccattgatatggacccgatgcgtccgaaagccatctggggctttaacggcacagagcgtcctggggcggtttaccttgccgcggcgctggcggcgcacagccagaaaggcattccagcgttctccatttatggccatgacgtgcaggatgccgacgatacctccattcctgccgacgtcgaagaaaaactgctgcgttttgcgcgggcagggttagcggtagccagcatgaaaggcaaaagctacctctccgtcggcggcgtgtcgatggggatcgcgggttccattgtcgatcataacttctttgaatcctggctgggcatgaaggtgcaagcggtagatatgaccgaactgcgccgccgtatcgatcaaaaaatttatgatgaggccgaactggagatggcgctggcgtgggcggataaaaacttccgctacggcgaagatcagaacgcctcgcagtataagcgcaatgaagcccagaaccgcgcggtgttaaaagagagcctgctgatggcgatgtgtattcgcgacatgatgcagggcaacaagacgctggcggacaaagggttagttgaagaatcgctgggctacaacgccattgccgccggcttccagggccagcgccactggaccgatcaatacccgaatggcgataccgccgaagcgctgctcaatagttcttttgactggaacggcgtacgcgaaccgtttgtcgtcgccaccgaaaatgacagtctgaacggcgtagcgatgctgttcggccatcaactcaccggtaccgcgcagatattcgccgacgtgcgaacctactggtcgccggaagccgtagaacgcgtcaccggccaggcactcagcggcctggcggaacacggcattattcacctgattaattccggttctgccgctctggacggtgcctgtaaacagcgcgacagcgaaggcaagccgaccatgaaaccgcactgggaaatcagccaacaagaggcggatgcgtgtctggcggccaccgaatggtgcccggcgattcacgaatacttccgcggcggcggctactcatcccgtttcctgaccgaaggcggcgtaccattcaccatgacccgcgtgaatatcatcaaaggcctggggccagtactgcaaatcgccgagggctggagcgtcgaactgccgaaagcgatgcacgatcagcttgatgcccgcaccaactctacctggcctactacctggtttgcgccgcgtcttaccggcaaaggcccgtttaccgatgtctattcggtgatggcgaactggggcgctaaccacggcgtactcaccatcggccatgtaggggcggactttattactctcgccgcgatgctgcgtatcccggtatgtatgcacaacgtggaggaggcgaagatctaccgtccttccgcctgggcggctcacggtatggatatcgaaggccaggattatcgcgcctgccagaattatggcccgctgtataaacgttaatgcggcttaggccggtggcgcaggtttaccgggactacgggcgcgtgaaccgtaggccggataagcgtagcgccatcgggcggcgtttatggagttatctatgaaacaagacgttatcctggttctcgactgcggtgcgacaaacgttcgggcgatcgccgttgatcgccaggggaaaattgtcgcccgcgcctcaaccgctaacgccagcgacattgccgcagaaaatagcgcctggcatcagtggtcgctggacgccatcctgcaacgtttcgccgattgttgcaggtcactctccagcgccctgtcggagtgtgttgttcgcggtattacggtgactacgttcggcgtcgatggcgcgctggtcgatgcgcagggcaagctgctctacccggtcatcagttggaaatgcccgcgaaccgctgccgtgatggaaacgattgagcgctttatctcgccccggcaattgcagacgctctccggcgtcggcgcgttcagctttaacacgctgtataaactggtctggcttaaagagaatcatccgcgcctgctggaacaagctcactgctggctgtttatctcgtcgctgattaaccaccgtctgaccggcgagtttacgaccgatatcactatggcaggcaccagccagctcctggatatccatcagcgcgactttagtccggaaatcctgcaggcgacgggcctggcgcgccgcctgttcccgcgtatcgtggaagcgggcgccccgataggcacgctacagacagacgcggccaggctactcggtctcccggcgggtgtgccggtgatctctgccggacacgatactcagttcgcgttattcggcgctggcgcgcagcaaggtgaaccggtgctctcctccggaacatgggagattctgatggtgcgcagcggtcaagtggatacctcgctgctcagtcagtatccgggctcgacctgtgaactggacagtcagtcggggctttataaccccggaatgcagtggctggcctccggtgtactcgaatgggtacgaaaactgctgtggacgccggaaacgccatggcaaacgctgatcgacgaagcgcgcgctattcccgctggcgcggaaggcgtacggatgcagtgcgatctgctcgcctgccaaaatgcaggctggcagggcgtgacgctcaataccacccgcggccatttctatcgcgccgcgctggaaggcctgacggcgcaacttcagcgtaatctgcgcacgctggagaaaatcggccattttaacgccacagaactgttactggttggcggcggcagtcgcaacgctttatggaatcaaattaaagcgaatcagcttgatatccctatcaaagtgctggacgacgcggaaaccaccgtggccggcgctgccatgtttggctggtacggcgtaggcgaatttagtagcccggaacaggcgcgcgcgcaggtcaattatcagtatcgttatttctggccgcaaaccgaacctgaaattattgagggagtatgaaatgctaaaaaccatttcaccgttaatttccccgacactgctcaaagtgctggccgagatgggccacggggacgaaatcattttttccgacgctcactttcccgcgcatagcctgggcccgcaggtgattcgcgccgatggtcttagcgtcagcgatctactgcgggcaattattccgctctttgagctggatagctacgccccgccgctggtgatgatggccgccgtggaaggcgacacgctcgatcccaacgttgaagcgcgctatcgcgatgccttgtcattagaagcgccgtgcccggatatcgttcgtatcgaccgctatgcgttttatgagcgggcgcaaaaagcgtttgcgatcgttatcacaggtgagtgcgcgaagtacggaaatattcttttaaaaaaaggggtaacgccgtaatctcttgccggtgcgcccgcatgacgcgggcgttcatcgaatgatggggtgagaaaaatgaaagcggcacgccaacaagcgatagtcgatctgctgatcaatcataaaagtctgaccaccgaagcgctggccacccggcttaacgtcagtaaagagaccatccgccgcgatctcagtgaactacagacgcagggaaaagtgctgcgtaatcacggacgagctaaatatattcatcgtgaaaatcaggacagcggcgatccattccatatccgcctgaaaagccattatgcgcacaaagccgatattgcccgtgaagcgttagcgtggatagaagaaggaatgacgattgcgctggatgccagttcaacctgctggtatctggcccgccagttgccggatattcccattcaggtttttaccaatagccatcctatctgtcaggagctgggaaaacgcgaacgcattgcgctgataagttccggcggccagcttgaacgtaaatatggctgttatgttaatccgtcgcttatctcacagctaaaatcgcttgatatcgatctgttcatcttttcctgtgaggggatcgacggcggcggcgatctgtgggactccaatgcgatcaacgccgattttaaatctatcctgctcaggcgcgcctcgcagtctttattattgattgataaaagtaaatttaatcgttcaggagaggcgcgcatcggccatctggatgacgtgacgcatattgtttcagatgcgccgcaatcgtagaccggataagcgtgcgtcatccggcgctgatgacgcgccggacgacggcaacgcgtttttatcgctcgtcgcgacgtccgccaacagccgcccacaaccgacgcacgtgtaccgtcacttcttcgcgatcgtgataaagctgacgcgcctggatctgcgcattaacgccgtgctcatccaactgcgcctgaagatacgccaggttatgcgacacctcttcatagcgttttttcatcggcagtttaaggttaaaaatcgtctcccgacaccagccgttcaccagccactgcgccattaacgcggtgactttggccggcttctccaccatatcgcagaccatccatgaaatattattccggttcggacggtacctgaagccatcctcacgcaaccaggtcacctgtccggtgtccatcaggctttgcgccatcgggccgttatctacggagtagacccacatattgcgcttcactaactggtacgtccatccgccgggacaggcgcccaaatccaccgcatacatgccgttcgccagacgttcatcccactcatcttccgggatgaaaacgtggagcgcctcttccagtttcagcgttgagcgactcggcgcatcagacggaaacttcaaacgcgggatgcccatataaaacggtgaattgttatgcgcgaacgaataaccggtatagcagcatcctggcgcgataaaaaagacatgaacgaccggacgcttcggcgtttcataattcgtcaatacgcccgcatcacgcaaagccgcgcgcagcggcaccgtaaatttgcggcagaacttcatcagttctttactttcattggtgtcggcgacttcaactcgcagctcgccgcccttttccactacgccctgcaacatgccgacaatcggcgtaattctgtcttccggcggtaaatgttgcagcagttcacccaccacaaaccactggcgggcgaaaatcagcgaactgaacggcagttctgaaatcagcttttcgccatcttccggctggtagcattcataaatgacatagcctgcgttctcttttacgcgtgcaaaaccaaatatttcccgttttcccgctttatcggtaatttctgcagcgcactctttttcaaaccccggacggcagagcaatacaactttattcatggctcgcgcccttacgtttcatacgaatggcgccaatcagcaatagcgcccagcccaccaggaaactgacgccgccgacaggcgtgatatacgcccacaggcgcagatgcgaaagcgcaaggcagtacaggctgccgctaaacagcaccgtgcccagcgccagaaaaacgctgctccagtaaaaccagatgctgatacggcgctgcatcgccaccgccaggccaaagatcgccagcgtatggaacgcctgatattgcaggccggtctgaatccagcccatttcaaccacgcccagggttttactcaaaacatgcgccccgaacgcgcccagagcaacgtaaataaaaccgctgatagcggcgacaatcagcataaaacggctggtcatggtcataccctaagttaattattgttcgtaacgaaaacggaatttttcttgctccgtcgccgccttcgccaaaatccactgacggaaggcggctattttacccagttctgcctggctgtcatgacaaaccagataaaaagcattcttactcaccagaacatcgttaaatggacacaccagtcgcccggcttcaatttccgactgcgccataacattattcgccagcgcgatcccctgtccgtgaatagcggcctgtagcaccatcgcgctgtggctaaatatcggcccttgctgaacgttaatatggttgagccctaactgacgagtataggcctgccagtcacgccgggaggcgtcgtgcaatagcgtgtgtttcgccagatcttccggcgtttttaacggtttttcgcctgtgagtaataaaggagaacagacgggcagtaaatattctgcgtataatttttcgacgcgcaagcccggccagtttccccggccataaaaaatcgcgacatcgacatcgtctgccagtttatcttcctgacggtcaacggcttgtatccgaacgtcaattcccggataagctgagttaaagctggagagcctgggcaccagccactggatggcaaaactgggcggtaaactcaccgtcagcgcccctttggcactgcgcgcctggagcttacgcgttgcttccgtgagctgggaaaatatctctttaatgtcgagaaaatagctttggccttcttccgtcagcagcagcgaacgattgcggcggcggaacagttttagccccaaaaaatcctcaagtgacttaatttggtggcttactgcggcctgcgtcacaaaaagttcttccgctgctcgcgtaaagctcaaatgacgcgcggcagcatcaaaaacgcgtaacgcatttaaaggaggtaatcgttttgacatggcctctggacttaatgtcgaatgaatttaacaaataggtaacaacatgtaacctattagtttttttaatctgagacattataaattgtccgttgaggttctaccagcaaatacctatagtggcggcacttcctgagccggaacgaaaagttttatcggaatgcgtgttctgatgggcttttggcttacggttgtgatgttgtgttgttgtgtttgcaattggtctgcgattcagaccacggtagcgagactaccctttttcacttcctgtacatttaccctgtctgtccatagtgattaatgtagcaccgccatattgcggtgcttttttttgtataacaaacggttagttttccagagccaccatctctttcacgtcagtacgattgatctgctgtttgttgccattagcgtctttatacgaaatcataccggtatcgttatcggtctggggtttaccgtcggtcacaatgctacgtccatcattggtgtgcataacgtaattaggaccggaacaggcgctcagggcaaaagtcagcatacatgcagagataattgcggcagtctttttcatcttcttctccttaaagctgtttgtgctatttaaagcggactccgtaacaggcttaaacattcgcctaacattattcagcataacctcctttacataattcgccaggatatacagacgattccgatggttaggacaaaccttgtatcagccgcgcttttacgccacgatcggtaaactgaaccgaggaatatcatgaacgcttttaatcccacgcagtttcgcgcgcagtttcccgcgctagccgatgcgggtgtttatctcgatagcgccgccacggcattaaagccacaggcagtcattgacgccacgcaccagttttattgtttgagcgccggtaacgttcatcgtagccagtttgcgcaggcgcagcgcctgacggcgcaatatgaagcggccagagcaaaagcagcgcggctgttaaacgcgcccgatgaaaaaagtatcgtctggacacgcggcaccaccgaagcgatcaacatggtggcgcagtgttacgcccgtcctcgtctgcgccccggcgatgaaattatcgttagcgtcgccgagcatcacgccaaccttgtgccctggctgatggtggcgcaacaaaccggcgcgcaggtcataaaactgccgcttaatgaccggcgtcttcctgatgttgagcgtctgccggaactgatcacgtcgcgcagccggattctggcgctggggcaaatgtcgaacgtaacgggcggctgcccggatctcgcaagcgctatcagcgccgctcacgcagcgggaatggtcgtgatggtagatggcgcgcaaggcgcggtacacttcccggcggatgttcagcagcttgatatcgatttttatgctttttccgctcacaaactgtatggcccgaccggtatcggcgtgctgtacggtaagccggagcttcttgaggcgatgtcgccctggctcggcggcggcaagatgatccgtgacgttagctttgaaggcttcaccactcaaagcgctccctggaaactggaagcggggacgccgaacgtcgccggggtcatcggcctgagcgctgcgctggaatggctgtccgatatcgatattgaacaggccgaaaactggagccgcgggctggcgacgctggcggaagacgcactggcgaaacgcccgggctttcgttcgttccgctgccaggactccagcctgctggcctttgattttgtcggcgtgcaccacggcgatatggtgacgctgctggcggaatacggtattgcgctccgggccgggcaacattgcgcccagccattgctggcggaacttggcgtcacagggactctgcgcgcctcttttgcgccgtataatacccaacatgatgtggatgcgttggttaacgccgttgaccgcgcgctggaactgctggtggattaatgacaaaccctctttataccggacacccgttcggcacaacggtaacggaagagacgttacgcgctatctttctcccgctgacccagtgggaggataaatatcgtcagttgattctgttaggaaaacagctccccgctctgccggatgaatgcaaagcgcaggcgaaagagatagccggctgcgagaaccgcgtctggctgggctttacccgatcagataacggaacgatgcactttttcggcgacagtgaggggcggattgtccgcggcctgctggcggtattgctcaccgcggtggaaggaaaaaacgccgccgagttgcaggctcgttcaccgctggcgctgtttgatgagctgggtttacgcgcccagcttagcgcctcacgtagtcaggggctgaacgcgctgagcgaagcgattgttgccgcaacgcataagggttgaaatagcgtaaatattctgtcgcctgacagcgccgcccgcagcggtcaggcgatgcagataaaataatccagtcactttattagtttcggcgtcagatttccctgataagcattcttttgatttttatcagctatcacaatgaaattacaatgttagaatccatgttaaaacggcgtgaagattttagagtaaataaagccactcgatgtagcgtagcaggagaactggaaaattcatacgcatcgggtgaagttataacaggatatggataagtggaaaaatatctgcgtagcggtaccatgtttgtggtactggcatttatattatgggggttaacacctttatattatcaatatttatcaggggggaatctcgcacaaatattgatataccgggtgttctggtcaattccattattactggcagtaagattgttatttcggcagcgaacgcgatttcatgatgcctggaaagataaaaaatcttttttcttctgcatgatcgccggacttttgatgattgtctcatggtcatcttttatttatgcgctaacccatcatctggtgcttgatgccagcctcggctattttatcaacccgctatttgttattgcgctgggatgcatttttcttaaagaaaaactgtcgttgtttcaggccatcgccgttttttccggtgtctgcggcctgacttttcaaattatcatgctacggcatttcccggcgctggcgctaaccatgggattatcatttgcgctatatggcctggcgcgaaagtttatacattatgatgtgatgacatcgataacgattgaaacattatgggcattgcctgtctcactattaatttttctctttagcgatactggaccaattatatccgctaatactcctttctttttgtatgtcatgacggcgccagtgacgatcattccactggtattatttgccatcgcgttaaatcacacctcgttgattgtcaccggactggcgcaatatatagagccgtctttacagttcttacttgccattatgatatttggcgagcacattaattacgcggaactgctctgcttttgtgcagtatggttcgggttgtttctatgcatatctgaaaatttatattcccattatctccgcgcccgtctgaaaccggtgttcggcagggtacagcgcttctttcgctaacgaagggcgcagggccggatacgcgtctgcgtgacactccgccccgtccttttattcttgtcgcgccgctttagccatgatcttcttcagcgcatgggaaacggcgacaaaaccgaacgttgccgtcaccatcgtcgccgcgccgaagccagaggcgcaatccatccgttttggcccttctgcggtagctttcatcgcgcatacggaaccgtccgcctgtgggtaaaccagcgcttcggtggaaaaaacgcagtccacgcccagcttacctttactgttcttcactacgccaaaattatgtttcaatctctcgcgcagttttgccgccagcggatcctggatggttttcgccaaatcagcgacctggatttgcgtcggatcgatctgcccgcccgcgccgccagtggtcactaaaggaaccttatatcggcgacagtacgcaatcagcgcggcttttggacgaacgctgtcaatagcgtcaatgacataggtaaaacccgcgttcatataacccgccacattatccggcgtgatgaaatcatcgataaccgttacccggcactccgggttaatttgccgaatccgttcggccatcacttccgctttcgccaacccgacgttatcacgcaacgcatggatctgacggttcgtattggtcacgcagacatcgtccatatcaatcagcgtaatcgcgccgatgcccgtacgcgccagcgcctctgccgcccatgatcccaccccgccgattcctacgacgcagatatgcgcctcagcaaaccgctgcagcgctttttcaccgtacagacgcgcggtgccgccaaagcgttggcgccaggcatcacttatcaccactgacatatgacctcagaataaaaaaaggtgaggttattcctcacccctgctcactattttcaggcccgatagcgatcgcgttatcgggcaatccggttgtcgcagaataccacaatcagccgctaaacacgttaccggcgcccggcgcgctttttaacacccagacgcgaccatagtgattataccatccggcacgatgcccggcatccgggccaattccctggtaaatatcaaagtgctggcctttaatcgctccgccgacatccagtgcgaccatcaaacgtagctcatactgaccgctaaatttaccgttgttatccagcaacggtacttccgccaacaaggtcgtgccaggcggaatgatgctgcggtcggaggcgacggatgctcgcccaatcagcggtacagcgctggcgcctttgaccggcgcaaaagattgcggcttaaagaagacgaacgacgggttctgctccagtaattcacgcacttccgcttcgctgtgcttctctccccattcgcgtatagcctgcatcgacatatcttcttttttcacttcaccgcgatcgataagcactttaccaatactgcgataaggccagccgtttttaccggcataactaaagaagttcagcggactaccatcaccaaaatcaatataaccgctgccctggacatccataataaagttatccatcagcgaattactccaggccaggatgtacttatcgctcagcgcgcctgcgtagatctgagcgcgggacggtaagcgtccgcgttttggcggcatactatagataggatactggaacgcgccctggcgcgtatggcgagcctgaacgacgggcgtatagtagcccgtgaactggacgttaccgtagttgtcggtgccttccatctgccaggcatcgataccaaactgacgcatagtgcgcgtatcgcctccggaacgtaaccagttctggacagcgttatagacgttgctttgattggtgtataaacgcggcgacgcggaacggatctggttgacctgctcggcaaagtctccagcattaatcggcgcgcccactgcgtccggctggtttaccagggagaagggctgggtaaatttcccgtccttatattgctgaccgcgatcggtcggttttgatgaacaggcagccagcattgccagcattacgcctgtcgccacatattttgcccaacgtcctttcatggtgtctcgtcttctgcgtaatcgaaagtgcccggtgaagataacaaaccgtccgaagtaatgaaatgcgatcgcgatctcattatgtaaattcgtttaaaaatcgcgctatctgcggtgtatttgcgcaattcatgagaaattagcgatttatatgaaaaaagggttgcaacaaaagctcagcggagtatagtgcgcatccacggacgcggggtggagcagcctggtagctcgtcgggctcataacccgaaggtcgtcggttcaaatccggcccccgcaaccaattacaatgagaatgcaagtttagacggacgcggggtggagcagcctggtagctcgtcgggctcataacccgaaggtcgtcggttcaaatccggcccccgcaaccaacttaatgaacacccttacgggtgtttttttgtatctgtcgtctggtccgcaacgacagtgcgggcagcatcctacttacccgcgcaataaactcgccgtcatctcaggttaacttcttctcgccagcgtcgccccatcggcaaaatacgctttaatgcccgccagaatcgactctgcgacctgttgctggaacgtcgcggtcttgagcttgcgttcttcttcaatgttactgataaacgccgtctcgaccagaatagacggaatatcgggcgcctttaacaccgcaaaccccgcctgctcgaccttgtttttatgcaggtcattaattttaccaagctgcttcaacaccgctttaccgaatttcaaactatcggcaatggtcagcgattgcaccatatcgaacatcgtatggtcgacataacggtcaccgcttttgctcacgccgccaattaagtccgaggcgttctgcgtttgcgccagatatttcgccgcagtactggtggcgcctttggtcgatagtgcgaatacggatgaaccgctaggctgccggctggtgaaggcatccgcatgaatagagacaaacaggtcggcgcgctgtttctgcgctttcgccacccggacttttaacggaatgaagatgtcttcattgcgcgtcatatagaccttcatgttgccttctttttcgatcaacgcgcgcaggcggcgggctatctggagcaccacgtctttttcacgcgttttgtatttgcctatcgcgccggggtcttcgccgccgtgtcccggatcaagcataataacaatggggcggtcgcgccccgctttaccgggctgcggcccgctttgcgaaggcggcacctgcttatccagatcgcctttattgtagtcttccagcagcgccagcagcggatcctgcatatcctgcgcattggcaggataaagatccatcaccagacgttctttaaagcctgccacaggcgccagcgcaaatagctgcggcttcacgttttgttttagctcaaagaccatacgcacagtcttaggatcaaactgccctacccttgcggatttgatatacggatcgtcgctgcgaatctgcgcgccaatgcctttaagcaccgagttcagattcacatcctcaatatctactaccacgcggtccgggttacttaaggcaaattgtttatatttcagcagacgattcgactctaccgtgacgcgggtatagctggacgcaggccagatacgcaccgcaacgacctggcttacggcagccagcccgacctggctcacgcttaatagccacatggcgcccgcgccttgtagtaaacggcgacggctgattgctgaattggctcccgacatgcttctcccgagcaaaaactaaatagagatcatacaaagttcatccaaattgaccggaaactttagcgaatgacgcataatctgtcatctataaaagggtaaacattctttttatattcacggcattactaagaaaagcgatcggaccgcataaaatttacgcttgcacagagggcaaaaacagaataaaaatacactaatttcgaataataattcactagtggggcgcgcaatgataaaggaacgtaaaaccgaactggtagaagggtttcgccattcagttccctatatcaacacccatcgcggaaaaacctttgtcattatgctcggcggcgaagccattgagcatgacaatttttccagcatcgttagcgatatcgggctactgcatagcctcggtattcgccttgtcgtggtgtatggcgcgcgaccgcaaatcgacgccaatctggccgcgcatcatcatgaaccgatttaccacaaaaacacgcgggtgacggacgccaaagcactggagctggtgaaacaggccgccggtttactccagcttgatattaccgcccgtctgtcgatgagtctgaacaatacgccgttgcagggcgcgcacattaatgtcgtcagtggcaatttcaccattgcgcagccgctgggcgttgatgatggcgtggactactgtcatagcggccgtatccggcgcattgatgaagatgcgatcaaccgccagttggataacggcgcgatcgttctgatggggccggtcgccgtctcagtgaccggcgaaagttttaatctgacctcagaagagattgccactcaactcgccgttaaactgaaagcggaaaaaatgatcggtttctgttcttctcagggcgttaccaatagcgagggcggcatcatttctgaactcttcccgaatgaagcacaggcgcgggtggaagagttggaagcgcagggcgattacaactccggaaccgtacgttttttgcgcggcgcggtaaaagcctgtcgtagcggcgttcgtcgttgccatctgatcagctatcaggaagatggctcgctattacaggaattgttctcgcgtgatggtatcggtacgcagatcgtcatggagagcgccgagcagatccgccgcgccaccatcaacgatattggcggtattctggagcttatccgcccactggaacagcagggcattctggtacgccgttcccgtgaacaactggagatggagatcgataaatttaccattattcagcgcgataatatgactatcgcctgcgcggcgctgtatccttttgtggaagagaaaataggcgaaatggcctgcgtagcggtacatccggattaccgcagctcatcgcgtggagaagtgcttctggagcgggttgccgcccaggcgcggcaaatggggctgcgtaaattgtttgtgctgacgacgcgcagtattcactggttccaggagcgcggttttacgcctgtcgatatagagttactgcctgagagcaagaaaaaaatgtataactatcagcgacgttcaaaggtgctgatggcagatttaggataacaaggggggcctgatggcgctgcgcttatcaggcctacgctcgaaagcatcatttggaggccggataagacgctacgcgtcgccatccggcgagaactcgtcttatccggtacgactgacttcatcaaataaggtggctagcccgctgcgccgctccgtacgcgtcacaatcgcgcctgccaggatccgttcatcggcatacagcgataaccgccgccgcgctcgcgtaacagcggtatacaccagctcccgcgtcacgaccggcgaacgctggctgggtaaaatcagcgcggcgtgatcaaattcagacccctgtgatttatgtaccgtcatcgcccaggttgtatcatgttccggcagacggctgggctgaacggacttgatcgtgccgtccggcatcacaaaccagacgcgtaacccctgcccgcgatcgagcgcaataccaatatcgccgttaaatagccccaacgcgctatcgttgcgcgcaatcattaccggacgcccttcgtaccagcgagaatgcgggtgccgctgaatttttcgttgctgcaccatcgcctgctcaatgcggtcattcaatcccctcacgccaaatgggccttcgcgcagcgcacaaagcagttgatactcattgaaagcctgaaggattgcctccggcgtcgctttttcatgcagcaaccgcaggtagcgaccatagcccgccagcgcttcatccagcatcccggcataatcgtcgctgctttgcaatgtacgcttctctatatcgctaaacccctgctgaaaaacagcctggattgccgacctgtcgccgcagttaattgccgccgccagcttgccgatgccagaatcgctgccgaaacgatagctcttttgcaacaaacagaggctatcgcgtaaagatgcggcttgcgttccggcccccgccggaatggcgctaccagtgagtcgacttagctgtcgggcgcgttccgccgtaaaccctgcgttgacataggcgcaaatatcgcccaacacagcgcccgcctcaacggatgccaactgatcgcgatcgccaagaaaaatgacccgcccgtgcggcggcagagagtcaatcaaacgtgacatcatcggcaaatcaatcattgatgcttcatcgaccaccagcacgtccagatgtagcgggttgcccgcatgatggcgtaatcgttggctgccgggctgtgcgcctagcagtcggtgcagcgtactggcgtcctccggtatacgctttttctgcgcatcggtaagaggaagctgacgcaacgccgcgccgagcgactccgtcaggcgtgcggccgctttcccggtcggcgctgccagccggatacggcaacgttcgccatccgccatttgaattaatgccgccagcagcttcgcgacggtggtggttttaccggtgccgggaccgcctgaaatcacggagatacggcgagttagcgctacggcggcggccaccttttgccagttcacctcgtctgtcggagggaatagcgcgtccagaatacgggataactgatcttcatctacggcgatggcctggttaacctcgttaaaaaagcgcgcaaccgtacgttcgttgcaccacatgcgattcaggtagagacgctcgccgcacagaattaacggcgcggggctatcgccgcagctaaccgccgcagacgccagtaaccgctttttccagtcgattggcgtagccgtttcgcttatacaggcgaccagtaagggatgcgcctcctccgttaacgttaaacgcgacaacggcagacacacgtgaccttcacctgcgtcatgactaagcagcgctgccgccagcgtcacggcgggatcgtcgttaccggcgacggttaaagcaaactgggcatcaatgggccgtaagagtttttgttcaacggcctccagcaaccgctcctggattgtcattgcgcctcctcactcatttcacctgcaaacatatcatccagttggttaattaacgccgccgcaggacgagtggtaaaaataccctgctgcggacgttcgccatccaccccgcgtaaaaagagatagatgacgccgccgaaatggcgttcatagtcgtaattcgtcattcgatgacgaaggtaacggtgcaatgccagcgtataaagctggtactgcaaatcatagcgatgcgcctgcatcgccgcagccatcgccgtctgggtataagcggcgctatcctcgcccagccagttagatttatagtcgagcaggtaatagcgcccttcataacggaacaccaggtcgataaagccctttaacatgccgcgaacctgcatgaaatccagcgcagggcaacctgctgaaagcgggtcgtatcgacgaatcaacgcatccagctctccggcggtaagcggctgggcaatcggcagataaaactccatttcgacctgtttttcacgctcggtcagcacgctcagactaacgcccgtctcgttaaggggaacgtgtaacacggtgtccagccagcgggtaagtacgggctcccatcgcgtttcaaaaccactcagctccagtttttcctgtacccattgggggtttatcggttgagtaaaatcaagctcttcaaacaggctgtgcaaaaatgttcccggcgatgccccgcgaggaaagtgatgcggcgtcattgccggcgcttccgccgcttcgccaacgcctgcggcgtcaatgtcgagacgaggaataagatcttgcgccacgctatgtccccgctgctgcaaaccggaataactggtgacgcgccagctatcataaagcaggcgttgcagcgctctggcgctgagttccgcatgcgatgcagcggcaatttgccagcgatcgttatccgtgttgcctggcgttcgacacacgatatcctcgtcgcatagcgcctcaatacaggcgcgaaggcctgcggcatccatcggttcgcctttttgcaggagtcgcccaagcgcgctttggtgcacatccgtctcgcctttcttatcgctgcgacgccgtaccagcggcgcgacgccgaggctgcaatgccacactgcacgggtcagcgcgacataaagtaggcgcaggtcttccgccaggcgttcggcttccgccagtgctatgctctcttcggcgtgactaaggtccagcaccgcctcgtaggagtgcctgtcgtgataaaaagcctggtcctgcacgcggaaatgggtgataaaaggtaaccagaccagcgggtattccagacctttcgatttatgaatggtgacgatttgcaccagatgcttatcgctttccagacgtagttgctggctggaagcattgctatcgggttcaaggatatgttgcgccagccaacgcaccagcgcatgttcgctttccagctgcgaaccggcttcctgtaacagttcgctaatatgcagaatatccgtcagccgacgttcacctcccgccgtcgccagcaggttttcagcaatattgcgcgccgacattagcgcgcgcagcataggcatcacgccgcgtttatgccaaatctgtcggtagccatcaaactcttcgacaaccgcatcccacgcattttcatcattgttaagcgtttcgatatccagcgcggtaaggcccatcattgatgtcgccagagcgctacgcagcgtattctcacgttcgggcgccatcaccgcctgcaacacccacagcatttcctgcgcttcgagcgtttcgaatacgctgtcgcggtttgaaagatagacggaagggatcgccagtaaggtcagcgcatcccgtatcagcgcggcttcccgcctgctgcgcaccaacacgctgatatccgaggcgcgaacgggccgcgacgaatcgccgttcgtcagcagcgcgtcgcccgtttgcccggcgcgcagccagtcgcgaatttgcgtggcgcacacctgcgccatataactttgataatcgcccgaaccgcagctttccccctccattagccacagggtcatcgccggttgaggcgcgtcattcactttaaattgcagcgactggtttctgggcgcaaactttaccggactgaagggaatatcgcggaacataaaggcgtcattcatctgactgaacagcttgttaacgctattcaccatccccggcgcggagcgccagttagtgtcaagggtatagtgcgcgctcacttcgctgcgagccttcatgtaggtaaagatatccgcgccacgaaacgcataaatcgcctgtttaggatcgccaatcagcaatagcgccgtatcgggttgatgtcgccagatacggcgaaaaatacggtactgttgtgggtcggtatcctgaaattcatcgatcatcgccaccggaaaacgggtacgaatcgccgcagccagcgcctcgccgctttcactacgcagcgcggtatctaaacggctgagcatatcgtcaaaccccagctcgccgcgccggcgtttttcctgagccaccgtttcacggatctctgatagcgctcgggtaagaaccagatctttaatcgatagcggttcgcccaacaggttatcaatggcgacaaacaatgggtgctggggcgtcacgccgccagctttggtgcgctcagctaaaaaacgctgtgaaaattttcccaacgcctcgggtaattgatagtttttcgtctcttcttgcgcccacgcggtgatcttttcgatccatttcgcctgattgccgcggttgaattttctgcgatcgatgccggatgattcgatcagcgcgtccagctcgctaaccgcctcacaccactgctgcttcacctggttgatgcgcgccaggatctgttcatggcgcgatgccagcgtctcctcctgcgatggcggcgctttaatgaccggcgcttcgccctgcagataacgatcgatatcctttaagagcgccttcggtcccttccacacgtcaaacaccacctgcgcgatgtcgcgcggcagcggatagcaatgacgccgccagaaatcggcgcaggcctgataacgcaacaaagattcgtcttcaataagctgttgctcaaacaacataccggattcgaaagcgttcaggctgagcatacgctggcaaaaaccgtggatggtaaagaccgcggcctcgtccatttgtcgttccgccagtaataaccactgcgcggcctgctttttgtcgctaatttcttccagcaagcgggcataaagcggattatccgtgctttcccgcagacaggcgatgcgcaactcatggatattactgcggattcgcccacgcagctcttcagtggcggcctccgtaaaggttaccaccagcagttcttcaacggtcaacggacggggaaatgcggcgctgccgcctaaaccgagcagtagccgcagatacagcgccgcgatagtaaacgttttgcctgtgcccgctgatgcttcaatcaaacgctcgcctgtcaggggcaagcgcagaggatcaagagtctcggcgacatcattcattcttttcgctcattagaggtaacgtttgctgcaaagcgctgacgttatcccacactttccagcctgtcggatgcacgtattctgcttttccattctggctaccggcaatctgtgacaatattgccataccttgtggttccaccaccgcctggtggaagaaatcggcaagcttttgtggcgtcagcaattttatctgagcgatgattttatcacgcgagtcaaagcgcatattaccccgatcgaaatccttgcttaaacgggatgcttcttcgcccaacgtttgcggcgcctggcgcatttgcgtaatgatcgcctgctgaatttgggcgaactcttccggcttcatcgccctcagcttcgcctcggcgtcagggaaaaatgcctgatagcgttgccacaggtaagagggctgtttatcgttgctctgtagcaggaaccccattccccactgacggccaacgctcatcggaaaggcgaaaacggcgtatcccagttgctcttcggttcgtagctgattgtaaaaccacggttgaacaatctgacctaacatcgcgctgtaggcagcgctgacgtactcgtcgtagccgaccggaacaaagaccgcggctaacgcggagtcggtgctactgcccgctttttcaaatattacggactgctttttctcaaccaccacgtctttgttgcgacaccacgccgatccgttcgccgcgagctgtttttgaacatcttgcgccagagaggtcgcctgggcttcgctcatattccctataaccagaaattccggacgagcgcccgtttttaacgcattacgataggccattacctctttcaacgtaatggacggcagcaaagcgcgacgttcatcacgggaaaaataaggcacctgcgaaatcatctgcaccggcataatcgcctgctcgtaggcttttcccttctccgcagaatccatcatctgcgtataccaggatttcgcctgcgccagctgttcctccgtggcgtcgtagctaaaatatccttccagcaacgccaggaaaagctgcggcaaacgctgggtataaccgttcgcagtgaccatcagaccattgttggcgttagtagaaaagctaatgccgcccactgccgcctggttgctgagctgatcgagcgccattcccgccagataatcattaagggcgaacagtacctgattgcgggcgctgtccatcgcctgcgggttacgcaataccacgctcacgtcagcttttggctcgctggcgaaataacgactcggcgcataaaccacgcgcaaatccgctttatcgacaatcagttctggccgcacgtagtttttgtcattcttaacaagcgtaaaatcatcaggaatataggggtttaactccggcagcgacaacgcaatgccctgtgctttttgctgccagtttttaaacgtctgttcgctaatcttatcgacctgataaggcgcatccacaaaatacgccgtcttattatggggttcctggggactgatgtaccagatgcgcgcattctgcggcgtcatcatcgccaggcgatttttgatagcggcaggatcgtaacgatcggcgatattcgccgcatccagcgtatgcgctaccgggacgcggatcatagtgtccgccagccattcgacatagtccatatcgcgggtaatcgacggatagcggaagtcgagatccagcacatgcgccagctcgtcaaagtaacgtttatctatccctttttcacgtaacatattgagatagctgaaaatagccgcgacgacttcatcacgattggctaaacctttatcggtcagcgttgccgaaatggcaaatacgccgctgttaccattaacaatcggatcggaatccgcgctaataccttcgaccagtccttgtttttgcagccagtcagagagcgtccctgggctacgattgccaattagataagagaccagttcatcggtcttgctgcggaactgcgcgctattgttatcaatacgaaactccacgcgcagcactttacgcggtagtgccggcacgtaatgaataatgatgcccttctgcgcctcggtgatgacaggtacggtaatttccggttttttaatctgtttattcggcacgcgaccataggttgcggcggcaatactcgccagttccggcaagggtttattactgtaaatcaccgccttcatcagattagatgaatagtatttttcatgaaaagcgatcaacgcctgttgcaccggatttcccggcttatcgcttagcgtttccagattgccgccagaaaagtgcgagcctggatgcgccgggttaatggtttcggcgcttacctgcgccatacgcataccgtcgcgggtgcgcgccatcgtcagctcggcattcaccgcgtttcgttcgcgttcggcatactttttattgagcaatggcgcggcaatggcgtcggccagtcgatctacggcacctggaagcgcgtcgttttcaacctccaggtagaaggctgttcgataaggcgcggtgctggcgttgtggctaccgccatgtcttttaaggtattcggcaaggctatccgcctgcggatatttttttgaccccatcaggcacatatgctcaagataatgagcaagcccctgatgagcctcaggatcttcaagcgatccaacgggcaccactaacgctgaaagcgactttacagcctgcggatcggatacgagcaacaccaccatgtcattatcaagacgtatcgcctgatactgccgggtatctttatcgcttttacggatagtttcttgcagcggttgccaaccgatatccgcctgaactgcaggcccccagagggcgaccaataacaataacgctttgaaccaggtgctgcggggcattcacggacctcatcattaactttcattcccactcatctgtatggtcacgtaaaccatcgacctgagcagaacgggatattattgtgctgaaccaggcagcatttttttatcagtaatcagtccgtgacgaagagcgcatcatagtcgaagccttttaatggcgcgattttcatacaatcaacgagactgattaaaacgaaacagcggtaacaggtaatgccgtgactgcgcaatgatagcctgcaacgtttcagattccagctgacgccaaagacgttgataccagatatcttcgccttcgccgctcaccatcatgttgccttcataagcctgtagaaactttgtcctggccttctgtaaagtatcatcgtcgtctaacatgacatcattttcagcgtcataacaggcttttatccatgcgccgccgctttccggcagtaccaatagcggagaagacatgccttcccggtagccttcaatcagttgcgccaggtaagccattgcctgcgttttatcaagaggcggaaatcgccactctccctctttacgcaaaaacaggcgactttcgccactaccgccgctggcacaatagacaaggtgttccagccaaagttgcacaccttgcgccacgctgattaaagcgggacgccagcgcaataatccatcctcctgtacctgcggcagccagccggttagctgaacgccattgcaaagcagatccacttccaggctttggctcggcttacggcaggcgatgacccggcttgccagttgctgcatctcctgacattgcgcatcccagaatatttcgccaaacgcgccgtaaggcaactctcccgcagcccggaaacggcggaacaagcgttcggcgtcgtcctcttcaaccagcgtattgagcaactgttggttaagttgatatcgcgtcaatccctctaattcaaacggttccgcatcaggaatctcactctcttccgagcggaaattaacctgaagccgcatctgaaaaaatgcgcgtaccggatgggcccaaaaacgctgcagactttccagagtcaatgtttccggcatcgtaaaaggaagcggctgcacaaagtcagaatgcgcttttcccgactgactcgccgcgggcaaccactctctggcataactttgctgttcgccgggttggtaattttgcgcatcaaaaggcatacgggtatgcagacgcgtaatatgcgctttgactcgtgcttcgctctcatcacaggtcagcgtttcgtcgcccggcaaatagtggctttgtccgatgtaatccaccaattcttgcaccagtacagagggaaagcgttcgctattatcctggatggagcgaccgatgtagctgatatacagcgtctgctgcgccgagattaacgcttccagaaacaggtagcggtcatcgtcgcgacggctacgatccccgcgcatgggtttttggctcatcaggtcaaagcccaacggcgcaagctggcgcgggtatacgccgtcgttcattcccagcaggcaaacgactctaaacggaatggaacgcatcggcatcagcgtacaaatattgatggggcccgccaggaagcgctggctaatacgttcctgatccagacgctgcgccagttcatcccgcagtagcgaaatcggtaccgcgtcgccatattccgccgcgacgccttcggcgataatggcctgccactgctgttcaatcaatgtcattgccgcttccgtgtccgcatcgggcaggaagaaatcattgaacatatcgcgacaaacgggcagccactcttccagcggtcgctcctgcgccagaccgcgccgccagatattaagctgcatcagcagcgaagccagatgcccgaccagctcagcaatcagaccgctggattcgtcataaggcagaaccgactgccactcgccctgggcgctttccatcgcataccccagcagcatacgcgtcaggccaaattgccacgtatgctgccccgtggcaggaagttccagctcgcgtacgttgtcatcgtcaattccccagcgaatgcctgactcattgacccacaagcgcaaataacgcagcccttcttcgttgatcgtaaagcgggcagccaataccggtacgtctaacaacgccagaacatcctcggagacgaagcggctgtccggtaacgaaagcaggctgataaatgcctgtaacaccggatgtgactgacgcgcccgccgatcggaaatggcataaggcagatagcgctccgttggcgcgctaccaaataccgcctggataaacgggctatagctgtcaatatcagccaccataacgataatgtcgcgcggcgttagcgtcggatcggcttccagcatcgccagcaggcgatcgtgcagtatttccacctcgcgctgcgggctgtgacaaacgtgaaaagagaggctgttatcctcgggatcgagcagacgcttattgtcgctgcgcgaatactcctcaagatttacgcccgccaccgcatggctttccagttcaagaatatccgcctgaatccgatgcaaaagattatctggcgtaatatcaacaaacgcatccagttcctggctgttttccagttcagatagcaggtagatataatcccgccccagttttccccatgaggccagtagcggattaccgatatcctgttcaccgtcgctgttaaataaggcttccggattctggttttcacggaacaacggtaaatgacggtcttcaaaactgtgacgacgctggcgagccatgagttttgccagccaggctgggtcttttatatccccccagtaataccgacacggattagtaaaaaggagatggatttcaatatgtttacccagcgcctgcaatgctctgagatacactggcggtaacgcggaaatgccgcaaataaaaacgcgggacggcaaccctggcgggcaggcggtcgcgctttccagcgtttgaataaagcgttggtagagattggcgcgatgccagcgcggctgccccagcgcggcggtatattccaccaatgctttccacaacggcgcctgccagttttgcgcctctcccagaccttccacggtttttcccgcttcccactgcgtaagccagtcaggccgataaaccagatactgatcgaacaggtcggcggcgcgcgcggaaagctgaaagagtttgcgtttatcggtgtcgtcggtcagataatggcgcagcagtacaaactcatccttatccagcaactgcggcagcaaggtcatcagtttccagctcatgctttgtttgctgaaagcgctttctttgggaatatccggcaacacgcggacaaacatctcccagataaaactcgccggtaacggaaaagcgatattcgccgcaataccaaacttttgtgaaagggtcatctgcagccactgcgccatacccgtgctttgtaccagaatcatttctggttcaaagggatcatccagccgctcgcgttcgacgatgaactccatcaacgcttccagcacatccagacgattggagtggtagacccttaacataattactcctgacgattaacgatttggacaatgcaagcgcgtcatctgcccctgcctgccagagggtgaaaccatcgtgacgctgatgctgacacatcccgattgcgttgtctgcatccggttggccttccagtcgtcagcaggcgaaaatggatacagcgccgtttgctgccacgcctgccgccagatctggagatactggtgtcgtaatgcaaaactgtgcattaatacccgctgatagcctgacagcgcggtgacgatcattaccattagaaccatcgccactaaaacttccgggaggctaaacccgcgttgtaaattcaggggatgcgacataacgccacctcttttaacggacaaaaatcgctccagccgtggggagaaaagacaatgcttccctgaatgacgttgcccaaacgccataacgtcatgccgtcatcttgcgccgccatcaccacctcatcccccgataatctccgcaaacagactctcgctcctgaagaggaatagcgccgacattccatttcggttacgcctgaccatagctgcccccgtccccattccagcgccgactgcacaagcgcctggcgttgtatcgccaggctctgcgtcgtcacgcgggcggcatagctggcctgctgctgatttacgccttgcagtagcagactgcccagaatcagtattaaaagcgccagtattagcgaagaagcgccacgttcccgattcacagattaaatcccgttacgctgtattgcgcgtcaataaccgtctgaggctcggctttgctggcgccgcgcagatgcagcatgagcactggcgagaatcccgttatatcccggcgctcaacggtaaacgccgtgatgagtaccgtattgggatcggtcattttttcccatcccttaccctggcaagatgttgctccgcgtaatgtctccagaacgttatccttcatacggaacccggtctggtcggcctctttcgccggtatggtatcccagaccccgttattattcccgtcccactgaacgatgacgcattgcccctgttcggcaagatgtaacccttcgccaatgcagtggccatgacagtaacccgcacgttgaagatgcttcgctacggtataggttcgctgccagatttcatcttccagcgataactgtcgcgtgttgtgccagatctcgcgttgtagcgccggtaaaaatcgtgcggacccaagcagtaaaatggaaccgatcgccatcgccagcacaacctccagtagcgagaacccccgcgtggttattgacacgtggcggcctcgttacgctcgcatagcctgattcgcccccaggaggagacgaccagacgccactctccggcagcgtttttcagtacgatgtgccctgcccatgccgtattgcgcaagccaaagaaggctaacgacggcgtgatatcggcaaggacgacatcacgccagtcgggcgtaaacacaaagggggaagatggcgtacacgatgtttgcgtagcaacagagctgacaaagcaccatgaaccgccttcgctgaccacgcgaagaatgtgatcgcggttatgccagtgagcgtccccacgaagttgcagcaggtaatcccgcacctgacatgcggtttgccacaggcgctgttgctgctgccagcgttgccagccataaagtcctgtggcgctgagaatgataatgagcgacatcgcgaccaccgtttcaatgagcgtatagccctgttgttttttcatgtcggcagtatggcgggcggaagaaaaataacgagcgccaaatacagattgttcggcgcgttacggaaaaaagttcatgtcttgcagcgcgttgcaaaatttcaggaatgcgcgccgaagattgagacgaagggtaaaaaaaaccgacgcgcgatgacgtcggttatggcaggatcgtcagcgcttagatagcgaccggcgctttaataccggggtgcggatcatagccttcaatttcgaaatcatcgaaccggtagtcaaaaagcgaatcgggtttacgcttaatgaccaatttcggcagcgcgcgcggttcacggcttaattgcaggtgcgtctgctccatatggttgctgtacaggtgcgtgtcgccgccggtccagacaaaatcgccgacgtccaggtcgcactgttgcgccatcatatgcaccagtaacgcgtagctggcaatgttgaacggcagaccgaggaacacatcgcaggagcgctgataaagctgacaggagagttttccatctgcgacataaaactggaaaaaggcgtgacacggcgccagcgccatcttatccagctcgccgacgttccacgcagaaacgataatacgacgagagtccgggtcgtttttaagctggcttaagaccgtggcgatctgatcgatatggcggccatccggtgttggccatgcacgccactgcttaccataaaccgggcctaaatcgccgttctcatcggcccattcgtcccagatggtgacattattttcgtgcaggtaagcgatgttggtatcgccctgcaaaaaccatagcagttcgtgaataattgaacgtaaatggcagcgtttcgtcgtcaccagaggaaagccttcctgcaggttaaaacgcatctgatggccaaaaatggaaagcgtgccggtgccggtacggtcgtttttctgtgtgccttcatccagcactttttgcatcagttctaaatactgtttcatggttcctcaggaaacgtgttgctgcgggcggcggcgatatgcccaaaccatcatgatcgcgccagcgataatcatcgggatagagagaatctgccccatgctgatgtactgtacccacgcgccggtaaattgcgcgtccggctggcggaagaattcaacaatgatacgaaacgcgccatagccaatcaggaataatccggagactgcgcccatcggacgcggtttgcgaataaagagattaaggatgataaacagcaccacgccttctaatgccaactcatacaactgggaagggtggcgtggcaatacgccgtaggtatcaaaaataggctgccattgcggatgtgacggcagcagcgcaatatcttccgcgcgtgagccaggaaagagcatggcaaaccggaagtcaggatcgacgcgcccccacaattcaccgttgataaagttgcccagacgcccggcgcccaggccgaacggaattaacggcgcaataaaatcagacacctgaaagaacgagcgcttcgtgcgcctggcgaagataatcatcaccagtatcacgccgataagcccgccgtggaaggacatgccgccgtcccagacgcggaataaatagagcgggttatccagaaacagagggaagttataaaacaggacatagccaatacgtccccccaggaagacccccaggaaacctgcatagagtaaattttcaacttcgtttttggtccaaccgcttcccggacggttagcgcgacgcaccgccaaccacatcgcgaaaacgaaccccaccagatacatcaagccataccagtgaagcgcgacgggcccaattgagaaaatgaccggatcaaagtccggaaaatgcagatagctactggtcatctgtcaccacaatttcttgttatttcgctgaagagatagcgattgataagcgcgcctgcgcgttgcagacgctccaaaggtgcgaataatagcacaagggttaaaagcgagatgccgattaccgttaaaagatatgtatacgcattgtctttcatcttgcaggcgtgttgtctgcgccgtgaatccacagtcactctcttttcccgctccagtcgttacaaccctcctcgaatcaatccccccatcccgcggcgctccataaacgccgccacctgatgacgcacttcggtcgccatctgcgcctcaaggctgcgtctggcaagggtttgcgcgtcttcaaaatcgatatgccgcagcagatatttcacacgcgctaccgaacggccattcatcgaaagatggcgatatcccagaccgataagaatcgccacgcacatcggatcgcccgccatctcgccgcacaagcgaagatcgaggccatgtttttcggcttcctgcgcgatcatggacagtgcgcgcagcatagccggatgcagactgtcgtaaatactggccacgcgggtattgttgcgatctaccgccaggatatattgcgttaaatcgttggtgccgaccgagataaagtcgatccggttagccagatgcggcagcataaataccattgatggtacttccagcataatgccgatacgcggtttcgggatcgcatagccgatcatctcctcgacctcgcgcccggcgcgttcgatcagacgccgcgcttcatcgacttcatcaatactggtgaccatcggcagcaaaatgctgaggttgccagtcgccgcattggcgcgcagcatcgcgcggacctggatcaaaaagatctccggctgatccagcgtaatgcggatcccgcgccagcccaaacacgggttctcctcgctgatcggcatatagggcagttgcttatccgctcccacatccagggtccgcagcgtcaccggtttatcgttaaacatttgcagcatcccttgatactgcgccacctgctcttcttccgagggaaacccgctttgcagcataaagggaatttcagtacggtacaggccgataccgtcgatccgactgcctaacttttcctcatgctcgggactgagcccggcattcagcatcactttgactcgctcgccgcttttcagttgggcgggaagattgacgtcgtcctccgccagacgactgagttctatctcttcactaatgagccgctgatattcctgaataagcacgggttcaggatcgaccagtaattcaccgcgatagccatccaccaccaacgtacggcgatgtagcaccgaaggctggatatcagcgcccatgacggtcgggataccgagcgcgcgcaccataatcgccgcatgcgagtttgccgcgccgtcgcgcaccacaacgcccgccagcctgtcctgcggcagctccgccagggtggtcgccgacagctcatccgcgaccagaataaaacgttccggccaggcgtttggcccctgaactgaatcatcaagatggaataacagccgctgccccagcgtgcgtaagtctcccgcacgttctttgaggtagttatcggttagcgccgcaaattgctcggcaaatttttcgatgatttttttaacggcccactccgcaacagcgcctttgtcgacctcggcgaagagttcgcgacgcagtctggcgtctgaaagcaggtgtgagtacagatcgaaaatggccgccgtctctttttgcgcgccggcggcaaagcgtttgctgtatcgtcggaattcgttcgccgcctcttccagagcgccggtcagtcgttcgcgttcaagagaggtatccagcgtagacgcttcgtaaacctgttccatcagcggcatggtcgcgtcttgccagcccgttgcgatagccacgcccggcgccgcaggaagcgcgcggattcgcgtctgccggtattgcccgaacagcgctgtgacctgcgactgtgacaggatagccgccatctgcgtagcgagcgtgacgaggaaagactcttcgctttcatcgtactggcgcaattcgcgctgctgtacgaccagcacgccgagaagttggcgacgctgaatgatcggcacgccgagaaacgcgcgaaaacgctcctcttttaccgaaggaatgtatttaaagctgggatgtttttgcgcatcggcaaggttaatgggttccgccagtctgcccaccagaccgacgatcccctcatcaaacgcaagcgcaacggttcgaccacgcggttttttcaacccccgcgtcgccatcaggtaataacagcgtcggtcatgatcggccaggtaaaccgagcaaacctctgtatccatcgcaagacagatatccgtgaccagaatattcagcgcctcgttcagacgcggcgcactggccactttttcgactatttcgcgcaggcgagtgagcataatttgcgtggcttaacctcttttacgtcgataagcaggcgcgctttgtagcttagggggattatcctgaagcgccatgacaacacttgcaaactctttcattaccctgcggtagacatcgcgtttaaatgacaccacttgtcgaaccggataccagtaacttacccagcgccagccgtcaaactccggcgtactgctggtttgcatattgatttcggcgtcggcgctcattaactgcaaaagaaaccacttttgtttctggccgatacataccggctttgtgtcccaacgcaccaaacgttttggtaacttgtaacgcaaccagttgcgagtagaagcaaggatccgcacatctttacggcttaacccaacttcttcaaacagttcccggtacatcgcctgttctgccgactcccctggatttatcccgccctgcgggaactgccaggagtgctgaccaaatcgccgggcccacatcacctgcccctgacgattacaaattacgatacctacatttgggcggtagccatcgtcatcaatcaccggactacctcaacataaaccttatatatgaacgattgtttcatactccagtgaggcggtaaaccactctgtaatagtgacacagcctaataacaattgaataactcacagtaaatagccgagttataaacagatgatgacgcccttgcgccattttattcaccttttctgtggatatagttgtgaagaagtatggaattaccacgggaaaacccagaacagtctgaattcctcatgctggagacagtaaaaatagtgccttatattcattgcgttatagacaaatcttacatgctaccttcataaagcgtgaccagcatcacatctaagatccttatgctgatgaaagatcaaccagcgtcggttttatccacagattgtgccaataacttacgcactatttgtctgaattttcgattttcgtcgcacgtcaaggctgtaaatggaaacagtagtggcggttttacacagttatcccaactttctgtggataacatagtgtaagatcctgtttattgtcagtgaccagaattggaaaacccgcttcagcgttgcgcaacacgaagaaacaacacaaaaaaggcaataaaaatcagtctattgaatataagacacagaaaaagataaactctgcccatacggtataaaatcactgctcattttttaatctaaggtaatggtaatgtccgctctttgtccgctactgactccgcctgcttcggaagcattgctgttagcccaggcgcggcagctttccggctatacgttaggcgagctggcggcgatggccggcattaccacgcctaaagatttgaagcgagacaaaggctggatcggtgtcttgctggagatctggctcggcgccagcgccgggagcaagccggagcaggatttcgccgcgttaggcgtagaactgaaaaccatcccggtggatagtctgggtcgtcctctggaaacaacctttgtttgcgtggcgccgttaaccggtaacagcggcgtgacctgggagacaagtcacgtacggcataaattgaagcgcgtgctatgggtgccggtcgaaggcgatcgcagcataccgttagccgaacgccgcgtaggttcgccgttactctggagtccgagtgaagaagaggacaggcagctacgcctcgactgggaagagctgatggacatgatagtgctgggccaggtggaacgcattaccgcccgtcatggcgaagtcttgcaactgcgacccaaagccgccaatgccagggcgctcaccgaggctatcggcgcgcgcggggaacctattttgacgctaccgcgtggattttatctgaaaaaaaattttacgcaggcgctgctggctcgccattttttattgcagaatccgtaacgtccattacacgcaaatgcgcctccgctatggctacgcgtcggaccgacgctcgataaacgtaagcgtattgtcgccgctattttacaccgttcctggttgcgcaaattcagcctgggctttcgcccgtcactcgacgggcctataattaccgcttctttttttggcaggactttgttcgatgttatttgcatggataaccgatcctaatgcctggctggcgctcggtacgctgacgctgctggagattgtacttgggatcgacaacattatttttctttctctggtggtagcaaaacttcccacggcgcaacgaaaccacgcacggcggcttgggttggcggcggcgatggttatgcgcctggcgctgctggcgtcaatcgcctgggtcactcggctgactaatccgctgtttgagcttttcggcgaagcgatttccgcccgtgatctcattctgttactgggcgggttatttttaatctggaaagccagcaaggagatccatgagtccatcgaaggcgaagaagaagggttaaaaacccgggtttcttctttcctgggcgcaatagtgcagattatgctgctggatattattttcagccttgattcagttatcacagcggttggcctctccgatcatctgtttattatgatggcggcagtcgttattgccgtgggcgtcatgatgtttgcggcacggcccatcggcgagtttgtcgatcgtcatccgtcggtaaaaatgctggcgctctcctttctgatcctggttggctttaccctgattctggaaagtttcgacgttcacgttccgaaaggttatatctatttcgccatgttcttctctatcgcagtagagagcctgaacctgttgcgtaataaaaagaatccgctgtaatcctgtctcgctcccccgccggggagcgaatactcactttatttcctttcttctcacagattaagattttgctgcttccgacatgcagagctgcgcgttattactagactattatcagacatatgattaacagactattatcagatgcaggctatgtgaggacaaacggatgaaaaagtgggcagttgtaatttccgcagtagggttggcttttgcggtatccggatgcagcagcgattatgtaatggcgacgaaagatggtcgtatgatcctgaccgatggaaaaccacaagttgacgatgataccggtctggtcagctataccgatgcacagggaaacgagatgcaaatcaaccgtgacgaagtatcccaaatcatcgaacgttaagcggtggcctgtgatcgaggtcagcgttctgcaagccttcaggctgcgtcccgtaacggtgcgtggcgaccacgcccggtaacaattacgccgcgcagcctgcaattttactttcccttttgccttccctctgccatttttattgtcctttgtcgggaatttctgacttcataataaaaaggaaacggctatgcactatcaccgtataccccacagctcgctcgaagtaagtacgctagggctgggcacaatgacatttggtgaacaaaacagcgaagccgacgctcacgcacagctcgactatgccatcgcaaatggcattaaccttatcgacgccgccgagatgtatccggtaccgccgcgcccggaaacacaagggctgacggagtcctatatcggtaactggctcgccaaacgcggcaaccgtgaaaaactgatcatcgccagcaaagttagcggaccggcacgtaataatgatcaaggcatccggcctcatcaggcgctggatcgtaaaaatattcgcgaagcgctacacgacagtttgacccgattgcagaccgactatctggatttgtatcaggtgcactggccgcagcgccccactaactgcttcggtaaactcggctataactggacggactccacgccagtagtaagtctgctggagacgttagacgcgctaagtgagtttcagcgagcgggtaagattcgttatattggcgtttcaaatgagacagcgtttggcgttatgcgctatctgcatctggcggaaaaacatgacctgccgcgtattgtcacgatccagaacccctatagcctgttaaaccgcagctacgaggtcgggctggcggaagtcagccagtatgaaggtgttgaattgctcgcctactcctgtctggcgtttggcacattaaccggtaaatacctgaacggggccaaacccgcaggcgcgcggaataccttgttcagccgcttcacacgttacagcggcgaacaggcgcaaaaagccgttgcctcctacgtcgatatcgcgaagcgtcacaatcttgatccggcgcagatggcgctggcctttgttcgccgccagccgtttgtcgccagtacgttactgggcgcaaccacgatggcgcagctcaagacgaatgtggaaagtctgcatctgacgttaagcgaagaggttctggcggagattgaggcggcgcatcaggtttatacctatccggcgccgtgatggtcagtgcccggtggcgctacgcttccgggcttacagagacaatgtaagcccgataacacgcactcgccgcccggcatattcactcagtatgatgcctgccggcgctgccagatccacagcgccgcgatcgccagcgcgaacagcacgccaaagccgatacctatcgccactgccggaacgccaaccagcaccgccagcgagtacagtcccagcattaatagcatggcgctattctcgcccagattttgtacggcaatggcattcccggcgccaacgctcttcttaccgcgctcctggagcaaagcgttgagcggcaccacaaaaaagccgcccagcatacctatcaacagcaacaaggcataagcaggcagcaatgcgtgctgtaatgagaagatcgcaaccacaacgccaatcaaaatcccggcgggcatacagcgcgatacggtctccagcgtcaccagttttgccgccgcgcccgcgccgaccacaatgcctaccgccaccatggcgttcaggtaagtcggcatggcgttatccgtaatccccagcgccaccggcacccacagcaccagcagaaaacgcagcgtcacgcctgcgccccagaatagcccggtccccaccagcgaaaaacgcgtttcaccgttacgccaaaggacaacgcaagcgctgaagaaactacgcgtcatcgccgacaaccgccaggattgtcctggacgcgccgccacaagcttcgggataaacaggttcgccgccactgcgccagcgtaggccaacgcgcaggcaaccagcgcagcgatgacatgccagtcggccaatacgccgcccgcgacggaaccgagcaaaatcgccgcaatcgtagaggcttccatcaggccattggctttcaccagcttatcgcccgtcgtcagttcgcccagaataccgtatttcgccggagaataagccgccgcgccaatcccgaccaacgtataaccgacaaaaggatttatgccgaggcagatacctgccgctcccgccagtttaagaccattggcgaccatcatcacccggcctttggcaaagctgtccgctatctggccgacaaacggcgcaaaaagaatgtaagcgcccacaaacaccatttgcaaaacaggctggctccagtccgggtaaaactgagctttcagcagtgccagcgtcgcgaacagcagcgcattatcgccaaaagccgagagaaactgcgcgacaatcaccgacagcatccctttcgaccagatggaggtgttagtacgtactgactcactcatgatgttgttccggcgcatccacccaacttttcagcgtcacaaaatcgggtttcccgctgccaagcaagggaagctgcttcagataacggatatcacgcgggacggcaagttccggaataccgtgttcacgagcatagtgctgtaacttttctcgggtgagttcgctgtcagtcgtaaacagtaccagcgcttcacctttgctggcatcgcttttaatggcggtagcgtgcattttgtccgccgaaacgccaagcgccagttgctcgaccatctccagcgagaccatttcgccagcaattttcgcaaagcgtttcgcgcgcccctgaatctgcacaaaaccattttcatcgaagcgtacaatatcgcccgtgtcgtaccagccgcgctcagtttcgcctctggagttttccgccgacggcacctccagcacgcccggtttttccacgcgcagatagccattcatgatattcggccctttcagctgtagccgaccgccgttttcaataccgggcaccgccagcagacgcgcgtccatgccaggcagaatgcggccaacagtgccaggcttagccgccatcggcacgttaatcgagactactggcgcgcattccgttaccccgtagccctcaagaatgcgcagaccgaatttatcctgccacagttgtttggtgctctcctgaagtttttccgcaccggccaccacatagcgcaggcgataaaaatcatacggattggcaaagcgcgcatagttgccgaggaaggttgacgtaccaaacagcacggtacagttacggtcatagaccagttccggcacaatgcgatagtgcagcggacttggataaagaaatacttccgcgccggtcaacaacggcgtaaacaggcccaccgtcaaaccgaacgagtgaaagagcggcagcgccgacataaaacggtcattggcggtgaaatccgcaatcgtttttatctgctcgacgttcgccagaatgcttttatggctgtgcaccacccctttcgggtgcccttccgagccggaggtaaaaagaatgatcgccgcgtcttccggctgctgttttacctgcgccagtcgcggcgccaggaggtgggcaaaaatccacagcttgtcggcgggtgtgacgtccgcttttaaatcttccaggtaaacccagcgaacctgcgttagctgttccggcaggtgccacaatttacctttatcgaggaactggcgggaggtaaaaatcgttttaatttccgccgcggtaatcgcgctggtcagcccttttacccccgccgtgtagttcatcatggccggaatgcggcgacgagaaaccgcgccgaaaatcaccgccgcgctgatggcggcattcggcagcattaaaccgattttctcgccctcaacgctgtacttttccagaatccggccaacaaaaagcgtcttggtcagtaacttacgatacgtatccggcgtaaagttaatgtcctcaatacagtttttacccgcgccgtaacgatattgcgccgccagcaacgattcgtataacgtctcgcgcgggcgcaccgccatacgcgcttccatcatgatctggtgcagcatctcacccgctatcttacgtctgtcgcgcgcgcgcggcgcttccggcatcggtatttgcgtcggcggtaaaatatgaagctgaatgcgggggaataagcgccgtttaaccagacctttcaggcgactgaaaggggtcagctccgcgccgtcaatgcggagcggaatgacggttgcgcccgattttgccgccacaaagcctgcgccgtcataaattttcatcagcgagccggtcacggaaatccgcccttccgggaaaatcaccactggacgcccctgttccaccagacgcaccaggtgtttaatggacatgggtttagtggggtcgagcggcacaaaatcgatcagcggcgttaaccagcgcatataccattgctggctgatggaggtatataccgcaaagacaggccgtaccggcaaaaacagcgccagtagcataccatcgataaatgaaacgtgattgggggtaattaagacccggttcccctgtagcgcccggacatcgccagtgacgcgcacacgataaagcacgcgaaacaggttacggaaaaatccaaacagcatttcaactccctttggccgacaattcgctaaaagatgaattgtggcagattacacgagttgcgtaacaggagcgatagcaaaataggttcgaaaaaaaacctgcgcatccgcgcaggttggtgcaagagacaggtacgaagagcgtaccgaataatctcaccaatcaatacctctgggatcttgattgtgggcttcgcgcgtctgcatcgccagtccgaaaacgcaaaggaataaacggaaatgcaacgagttgtgtaaattatccgttactgttacaggttcaggcgaaacaaaaaaaaacctgcgcatctctacgcaggttggtgtaattcgtgtgatcaacaatgacgttgattccacctatcaatacctctgggatcaccactctatcaacctgactcgctggcctgccagcagacaatcgcaacagcgcttcgcaaactgtaacgaaagatttgtattgtcactttacagacgcatttctcccgtgcaggtcacatttgcccgacacggcggggcaagaggcttgaacagacgttcattttccgtaaaactggcgtaatgtaagcgtttacccactataggtattatcatggcgaccataaaagatgtagcccgactggccggtgtttcagtcgccaccgtttctcgcgttattaacgattcgccaaaagccagcgaagcgtcccggctggcggtaaccagcgcaatggagtccctgagctatcaccctaacgccaacgcgcgcgcgctggcacagcaggcaacggaaaccctcggtctggtggtcggcgacgtttccgatccttttttcggcgcgatggtgaaagccgttgaacaggtggcgtatcacaccggcaattttttactgattggcaacgggtatcataacgaacaaaaagagcgtcaggctattgaacagttgattcgtcatcgttgcgcagcgttagtggtgcacgccaaaatgattccggatgcggacctggcctcattaatgaagcaaatccccggcatggtgctgattaaccgcattttaccggggttagaacaccgctgtgtcgcgctggatgaccgttacggggcatggctggcgacccggcatctgatccagcaaggtcatacgcgtattgggtatatctgttccaatcacactatctctgatgccgaagatcgcctgaggggctattacgatgcgctggcggaaagccatatcccggctaacgatcggctggtgacgttcggcgaaccggatgaaagcggcggcgagcaggcgatgactgagttattaggtcgcggcagaaattttaccgcggtggcctgctataacgactcgatggcggctggcgcgatgggtgtattaaatgataatggcgtgggggtgccgggcgaagtatcgctcatcggttttgatgatgtactggtctcacgctatgtgcgtccccgactgaccaccattcggtatccgatcgtcaccatggcgacacaggcggcggagctggccttagcgctggcagggaaatgtcctacgccagaagtaactcatgtatttagtccgacactggtacgccgacattcggtgtccacgccgacggataccgggcacctgtcgacaaccgattaatcagggtagcatgatggcgacaatgctggatgtttcccgccatgcgggcgtatcaaaggccaccgtctcacgagtgctgaatgggacggggcaggtaaaagaaagcacgcgccagaaagtgtttacggcgatgcaggctctgggctatcgccccaacctgctggcacgctcgctggcgaatcgcaccagcaacagcatcggtctggtcgtctctacgtttgacggcttctatttcggcagtttgttgcgccgggcgtcgcgccaggcggagtctcataacaagcagttgatcgtcaccgatggtcacgatacgccggaacgagagcagaaagccgtacaaatgttggccgacagacagtgcgacgctattattctttacactcgctatatggatgagctggcgattttgtcgttgattgacgccacggaaatgccgctggtgattattaatcgcaacgtcactcaggcccgcgatcgcgctattttcttcgagcaggagacggcggcattccaggcggtggaatatctgattacgcagggccatcgcgatatcgcctgtattacgctgcctgttcatactcccaccggcacatcacgcgtagcgggttatcgcaaggcgctggaaaagtatggcattccctggcaaccggcaaaagtgaaatacggcgattacacgctgacgcgcggctatgacgcctgccgggaattactggaggaaggcgtcacgtttagcgcgctattcgcctgtaatgatgacacggcgctgggcgcggcaaaagcgctgcgccaggccggattacgcatcccacaggatgtgtcgctgtttggttttgacgatgcgccgggcgcaacctggcttgagccggggctttcaacagtctatttacccatcgaggctatgatagccaccgcgatcgatcaggccgttcgtctggcgaacagcgagccggtcgccccgatcccgccctttaccggcacgctgattctgcgcgagtccgtcgccgcgggcccgttttttcaacgtccggcctaatgatgcgcttcagagcatctccagcgctaacagctcttcaatggtttgacgacggcggatcagccgcgcctgtccattgtcaaacagcacttccggcaggagcgggcggctgttgtaattcgatgacatagacgcgccgtacgcgccggtatcgtgcaatacgaggtaatcgccggggatgaccgcaggtaaggcgcgtgtttcaaccattcccccttcctgctgcgtaaaaacatcgcctgattcgcatagcggcccggctaccaccgtctcgacccacgggccattttcaagcgcgcgaccatccgccgccagcgccgaaatacggtgatagctaccgtacatcgccgggcgcatcagatcgttaaaaccagcgtcgaccagcacgaaatggcggcttcccatctgttttacgctacgcacctgcgttaccagcacgcccgattgcgccaccagaaaacgtccaggttcgatctcaagtttgaccgcatgtcccagatggcgggcgatttgctcgcgcgccgcgttccacaggccatagtaatggcgcgtatcaacgggctcttctccctcacgataaggtatcgagagtccgccgcctgccgaaatcgcctccacatcctgaccacattccagcacctggcgtaccatcgcgccgcaaacctgctccagatggccataatcgacgccggaaccaatgtgcatatggataccgacaagtttcagtcggtatttctgcattaccgccagcgccgccggaagatcgctatgccagatgccgtgtttgctgttttcgcccccggtgttggttttctggctgtggccgtgaccaaagccaggattcacgcgcaaccagacgcgatgcccaggcgaaacctgaccaagctgcgtcagcatatctaccgagccggcattgaccggaatatgcagttcgctgacgcgcgccagcgtggcggcgtcaatcacatcggcggtaaaaacgatatcatcagggcacgtttgcggatcgtagcccgccgccagcgcacgttcgatctctcccaatgaaacagaatccaccttgacgcccagcgcgcgcattaagcgcaggatatgaatgttcgaacaggctttttgcgcaaaacgcacgacgtcaaactgctgcagggcggctatctgacggcgaataatgtgcgcgtcatagacccagaccggacagccgaattcagcaggcaatctgagcaaattttcagcgttaaggtcagtttcagcgtgataatgcggcaatgacataacaaactccggaacgggctttttaacgattacgccataccttagaaagaataaaaaatatcgttttattgtcagtctatgcaaaaatgatatgggataaatgattcagggaaacgtatggctgccgttaatttacgtcacattgaaatttttcatgccgtaatgaccgccggaaatctcaccgaagcggcgcggctgctgcatacctcgcagcctaccgtcagtcgcgagctggcgcgttttgagaaagtgctgggattaacgctgtttgagcgcacacgcgggcgcttacatccgacggtgcaagggctacgcctgttcgaagaggtacaacgctcctggtatgggttggatcgcatcgtcagcgcggcggaaagtctgcgcgagttccgtcagggcgaactctctatcgcctgcctgccggtcttttcacaatcctttttgccgccgttactaccgccttttctggcacgttatccggatgtcagcctgaatattgtgccgcaggagtcgccgttgctggaagagtggctctccgcccagcgccacgacttagggctgacggagacgcttcatgccccggcaggaacaacccgtaccgagttactaacgctgaatgaagtgtgcgtactgccctgcgaccatccgcttgccgccaaaacggtactgacgccagacgattttcagggggaaaactttatcagcctctcccgcctggacagctatcgacagttgttggatacgttatttgccgaacatcaggtgaagcgcagaatggtggtggaaacgcatagcgcggcctccgtctgcgcgatggtgcgcgccggggcgggcgtttcgatcgttaacccgctgaccgcgctggactatgccgccagcggcgtcaccgtccgccgcttcagcattgacgtgccctttaccgtcagcctgattcgcccgctacaccgccctgcctccgcgctggttgacgccttcagtaagcatttacaaacgcacctttcgcgcctggtcgaaccgctggaggttattctggggccgatgacgaaagcataaagctcacggcatctgcggcatgaattgccgtggtatcgaaaaccggtagcgcgctttgcgtctggggaacaagcaaacctatttcagtacagccaaaaataacgccctgcgcgccttgcgcagccagttgttcgataacctgtaaataatagtggcgcgacgcgtcagtgaatgtcccctgacagagctcgtcaaaaatcacctgattgatacgcgcccgatcgtccgcctccggcacgatggtctcaatcgcaaattgctgttccagccgcccgcgataaaaatcctgttccatcgtatagcgagtccctaatagcgccacgcgatgcaacccctgacgggcgatagctcgcccggtagcatccgcgatgtgtaggaaaggcagagaacaacgagattcaataacgtgcgcgattttatgcatggtgttggtacacagcacaatgccttctgcgcccgcctgctgtaacccatgggcggcctgcgccaggatatcgcccgctttatcccactcgtcgcggcgttgacatacttcaatatcgtggaaatctacgctatgcagcagtaagctcgccgagtgcaggcctcccaactgctgtttaataccttcattgattaaacggtaataagggatagtcgattcccagctcatcccccccaacagtccgatcgttttcactgcgctctcctttttgtaaagcattatggcagtgaagcaaacttacacatccgtttccagtctatttttcatcatgccggataacaggcgtcatccggcatgggaggggggattacacgccaatatttcttagcttctcgcccgccatcagcttgcgttcgatgtgctccagggtgacatttttggtttccggaatcagccagaaagtgatgccgataaaagcgatattcagcgcggtgtagagccagaatgtacctgccgcgccaatgctgtccaacagtgtcaggaatgtcgcgccgatgatcatgttcgatacccagtttgtcgtggttgaacaggtaatgccaaaatcacggcatttcagcggctggatttccgaacacagtatccacaccaccggagcggcgctcatcgcgtaaccggcgatacacatcatcgtcatcccaacggaaagccaggagagaccgcttgatgccgtaccgttatcaaactgcatcaggcagtagcccaacaccaatgtccctaacgccattacgctgaaaccgatttttaacgccggtttacgcccggccttatcgaccgtaaagacggcgataaacgtcgcgaacataaaagtcagtccgaccaccagcgtggcgatcatttgctgttccgtggtggtaaagccggccattttaaaaatgcgcggcgcatagtacataatgatgttcatgccggtgaactgctgcattgcctgtagcagcataccgaggaacacggcgcggcgaacattgcggttagctttaaataatgcccaccctccctgcttgagtttgaggctttcccgaatctcattcagttcatcacgggctttttccgaggtatcgcgcagcatacgcagcacctcttccgcttcaatatggcgacctttttgcgccagccaacgcggactattcggcaggaataccaccagaataatgagcaacaccgcaggcagcgccagcacgcccaacatcgcgcgccagttgccgctgtagctgaatgccgtatcggataaaaaagccagcacaatgcctaacgtcaccatcagttgatacatactgatcattttgccgcgaacattttcacttgccatttcagagagataaagcggcgcggtataggaggcaatccctactgctacgcccagtatcacgcgggcgccaatcaatacttccacgctggaagcaaacgccgaccccagcgagccgagcacgaacaaaatcgcgccagccatcaggctatacttacgccccagccggaatgaaagccagccgttaaataatgcgccaattgccgcgccaagcatcatgctgctgacgacccattcctgcagccggctggtcagtacgaaatggtcggtaataaaaggcagcgccccggcgataacgccgatatccagaccaaataacagtcccgctaccgctgcagaaaccgaaacaaacatattcatacgtcgtgtgtcgcgaagcgaacgcggcgttaaagcagagtcatgattaatagagaccatattttcctgccacaacagagtaagacatagcctgaaagtacgggatactcttcctcaagtgtcaggctggaaacggcataaatatggattaaatggctacgctatagcgatatgtgatggatattacactttttaaatttaacgccgttgccgggtatttttttaaaccaccaatatttcaatgaattaaagcattgatcatagctattatttaacaatatatggattaagttaaacccacaatatggactatgctaatgagatcataaaaaaaccctgtacgaggacagggctttatcagttttttcggccaaagcgtcgattttcccagaaacgcatttgtcagtagcggattaacgcgccagccaaccgccatctaccgctatggtatagccgttaatataatcagcggcgctggatgccaggaagactaccggccccattaaatcgcccggtagcccccaacgtccagccggaatacggtcgagaatttcggcgctacgttgtgcatcagcgcgcaattgctgggtattattcgtggacatatagcccggtgcgatggcgttcacattgatattgtgtttcgcccactcgttcgccatcagacgtgttattcccattacgccgcttttcgacgcggtataagacggaacgcgaatgccgccctggaaggagagcatagacgcgatattaataattttgccgccgttgccctgggcaataaaatgttttgccgccgcctgagacataaagaacacgctcttgatgttcaggttcataacgtcatcccagtctttttccgtgaaatcaatcgcatcttcacgacggatcaaacccgcgttattcaccagaatatcaatatgaccgtattccgccaccgcccgttccagtaatgccggaatgccatcgatttgacgcagatcggctgtcaggcttaaaaaacgacgtcccagagcggtgacgcgcgcaatagtttccgtcggttcaacaatgttaataccaacaatgtcacagcccgcttccgccagccctaacgccatcccctgccccaatccggtatcgcaccccgtcacaaccgcgactttaccttcaagagaaaatgcattcaaaatcattgttaatccttatttttgtcatgcctgtcacgcacaggcgttatcaccggtcgcgactagcgcagatcttgtaccgcaacgtgatccatgtcatcgaagacctgattttctcccaccatgccccaaacaaacgtataggctttggtgccaacgccggaatgtattgaccagcttggggaaataaccgcctgttcattacgcatcacaatatgacgggtttcctgaggctgccccatcatatggaaaacgcaactgtcctcttccatattgaaatagaggtacacttccatacggcgctcatgggtatggcatggcatggtgttccatagattgccgggcgccagttcggtgagtcccatactgagctgacaggtttccagtacatccggtacgaaatatttattgatagtgcgacggttactggtgaggttatcgcctaaggtgacgggcgcaacgtcggcaggcgacacttttttcgtcggataagcggtatgcgctggcgcgcagttgtaataaaacttcgccggtctgctcgcctcattgctgacgaagaccagctctttcgcccctttaccaatatacagagcatcacgatgaccaatgtcatggcgctgcccgtcaacgataatggcgcccgcgccgccaatattaatgacgcccagctcgcggcggtccagtaatcgggaaacgccaagctgtttacctacttctccgccgatttcaacgggatggctgacgggcataatgccgccgacaataatacggtcgatatggctgtagaccatcgtatattcatcagcgacaaaaatattttctattaaaaactcgcgtcgcagcgcctgggtgtccagcgttttagcgtgctcgctatggatactttgccttacgtccacttttccctccaatgataaatcgatcgcaatggcacaaaatcaaaacactgttttgatttatttaacggcatcatagtcgcctggataaaggttttcaacaataaataaaacaacgtttcatttatatggttggttatttttaaaactgctgtagcgatcacgatcggcgctaaaacttacgcatttgtctgattttcagacatgcgcgccagatgctgtatgcggttacccagataaaaattggagcttgttttagaacgaggtctgatgtgcgaattgaattaaaagcggtatgcgtctgcaatgcccgacgcggcaagacgttccgcgctataacgaaaaagggggttctgtcactggctttgccctcgtgatagagggctttttatgacggaatactgaaacaggaaaaggatggctggcgcaggatcagtcgcgttcaatggttaaagcaacgccctgaccgccaccgatacacagcgtcgccaggcctttacgcgcgtcgcgtttaaccatttcgtgcaccagtgaaaccagaattcgacagccggaagcgccaatgggatgccccagcgcaatcgcgccgccattaacgtttacccgtcgctcatcccattccagcatttttcctaccgataacgcctgggcggcaaacgcttcgttggcttcgataaggtcgacctccgtcagttgccagccggcacgctccagacagcgccgggtagcatataccggcgcaatccccattagcgcaggatcgacgccgacgctggcaaacgcgcggatgcgcgccagcaccggcagccccagcgcctgggctttcgcctcgctcatcatcatcaccgcggcggcgccatcgttgattgaggaggcattacccgccgtcaccgaacctaaactatcaaacgccggatgcagcagggctaacccctccgcactggcgtcggcccgcggttgttcatccgtatcgacaattgcggtctgcccattacgttgcgtgacgatggggacaatctcatctttaaaacgtccggtatcaatcgcggccctggctttttgctgcgaactgagcgcataagcatcctgtaactcgcggctgatgccatattcccgcgccaggttttctgccgtcacgccaatgtgataatcgttgaaggcatcccataagccatcatgtaccagactatccaccagattgtcggcatcaggcaacgcgccgctacggctgtcattgaggacatgcggcgcacggctcatattctcctgcccgcccgcaataacaatgtccgcttcgccgcactgaatagcctgcgtcgccaggtgcaacgcttttaaaccggaaccacaaacgtcattaatggtaatagcggaaacggtagtcggcagccctcctttgatggctgactggcgcgccggattctgcccggcgccagccgtcagtacctgaccgaggatgacctcatcgatagcgttagcgtccacgccggtgcgctcaattaacgcttttacgaccatgctccccagctcgacggcggaatgacgggccagcgttccctgaaaacagccgatgggtgtccgtaaagcccccactatcacaacctctttcattaccacctcagcgcaaaatgacaccgccatagtagagcattgttaaaattagttttcttgattgtttaaaaaaagtgagttttatcacaaaggaaatgacgctgatttgacggtgacgcagcttatttctgctgcaaatggtagcgaagccagttccccgccgttccgggcggcgttttcttgttccacagcaaatcaatagcaatcgccctcggccagccaggaacatccagctgcgccagcggtttttccgccgcaaactcttccaccagcgcgcagggcaatacgcaccagccaaatccctgaaccgccatgctcaacagtaataaatagtttggcgctgaccaggccgggccgcgcgtaatgttggcgttagagtcaagataggtattcagacgcagctcgcgccaggtatgcagttgctcccattgcaggttcgtctgtgacgccaacggatgcgtggtcgccacataaacccccatccagctttgaacaggcagacgcgccgcgccaatgtctgtgggatagtcatcacgcgcttcaatcaggcctatctgggcacgccctttttgcagcaggtcgatgacatcatcattttctccgatcaagcattcaaactcggtatgcggaaattgacgatcaaactgcgccattaactcttccagactgtcagggtgcagggtatcagagaggacaaacgtgagtcttgcctccgtctcgccggataacgtcagcgccacctcatccagacggtcgctcgccgataaaatagcctgaacatagctaagcacccgttttccttcttcggtcagaacgggctggcgcgaagatcgatcaaataatgaaaatcccagatccgcctccagatgcgcaatggcgatactaatggtggactggcttttacgcaggcggcgcgccgccgcagaaaacgaaccgcaagagacggtctcaacaaatgccattaaagcttcaggtgagtaacgcataacctatctactttatcgatggatgttatcttttaggtatcacattaaacgataaaatagcggaaatttctttagcttgattaagagtaaggttttttcgtttatgcaacatgacgccatacaacgtcgctcgctgccggagcgtattttccatgctgtctgttttgaaggtattgcgactgcgatactggcgccaacgaccgcctggctaatgcagcgctcggtgctggagatgggcggcctgacgatattgctggcaacgacggccatgatctggaatatcatttataacgctctgtttgatcgactgtggcccgcgcatcaggtgagacgaaccgccaaagtgcgcgcactccatgcgttaggatttgaaagtgggtttattgtcattggcgtcagtattgtcgcttgggtactgaatgtcagcctgctacaagcattcaccctggaaattggtttcttcctgttctttttgccgtacacgatgctgtacaactgggcatacgatgttttacgccaacgaatagtgactcgccgccaacagcgcgttagtgcatgatattgctcttttttgccgggatcgcaacgctcccggccctccgcctccacgacatccatctgcttaaaacgcccccaactgacgctatttatggtaaattgcgcttctttttgtgtgttttatagttgataaattcaaataatgtctaaaatttggtcaaaagatgagactctctggagttttgcattatacggaacggctgtaggcgcaggcactcttttccttcccatccagttgggatcggcaggcgcaatcgtgctatttattaccgcgctggtcgcctggcctctaacatactggccgcataaggcgctgtgtcagtttattctttcctcaaagacttctgccggtgagggaattactggcgccgttactcattattacggcaagaaaatcggcaatattattaccacgctttatttcattgcgttttttgtcgtggtattaatttatgctgtggcgattaccaattccctgacagagcaattagcgaagcatattcagatagatattcgcatccggatggcagttagcttcggcgtagtacttatcctgaatatgattttcttaatgggaagacatgccactcttcgcgtaatgggctttttagtctttccacttatcgcttacttcttgttcctttcgctctacttaaccggaagctggcaaccctcgttactgaccgggcagatgtctttggatagtcacacgttgcaccaggtatggatttctattccggtgatggtttttgcttttagccatacgcccattatttcgacgtttgccatcgacagacgggaaaattttggcgatcaggccatggataaatgcaaaaagatcatgaaggtcgcctatctgattatctgcctgagcgtgctgttctttgtctttagctgcctgctctccattccgccgtcatacattgaagacgcgcgcaacgaaggcgttaccatcctttccgcgctctcgatgatgcccaatgcgccggcctggctctctatttccggtattatcgttgccgtcgtggccatgtcgaaatctttcctcggcacctatttcggcgtcatcgagggcgcaaccgaaatggtaagaaccaccctacagcaggttggcgtaaaaaaaagccgggcgttcaatcgcgcgctgtctatcatgctggtttccgggattacgtttattatttgctgtattaacccgaatgccatctctatgatttatgctattagcggcccgctcattgcgatgattctgtttattatgcccacgttgtcaacgtacctgataccggcattgaaaccctaccgttcagtaggtaatttcattacgttggtcgtcggtttactttgcgtatcggtgatgtttttcggctaaagtaaaagatagccgggatataactcccggctattttatataagaatccagcacctttaatattacgtccagatcttcttcacgtctggcttcatcactctgatgaacgatatgctcggtcagatgacctttaatcacctcgcgcattaagccatttaccgcgccgcgaatcgccgcgatctgttgtaacacggccgcgcattcatgcggttcatccagcattttttttagcgctatcacctgtccctgaatcttgctggttctggctttaagcttttgtttgtcccggatggtatgtgacattacaacacctcactaacattaacgaatacaaattatagcattacgatgctactggggggtagtattctatactgggggggagtagaatgacgcccacataaaacaactaagaatcattctcatgggtgaattttcgacacttcttcagcaaggaaacggctggttcttcattcccagcgccattttattaggtattttgcacgggcttgaaccagggcactccaaaactatgatggcggcttttatcattgccattaaaggtacggttaaacaggccgtcatgctcggtctggcagcaacgctttctcataccgcgatcgtctggttaatcgcgctgggtgggatgtatcttagccgggcattcaccgcacaatcagtggaaccatggctgcagttaatttctgcgattattattctgagcaccgcgtgctggatgttctggcggacatggcgaggcgagcagcagtggctggcgggaaaccaccatcacgaccacgaccacgaccacgaccacgaccacgaccacgaccacgaccatcatggtcacatacatccggaaggtgcaacgtcaaaagcgtatcaggatgcccatgaacgcgcccatgctgccgatattcaacgccgttttgatggtcaaacagtgactaatggacagatcctgctattcggcctgaccggagggcttatcccctgtccggctgcgatcaccgttttactgatttgtatccagcttaaagcgtttacgctgggcgccacgatggtgctgagctttagtcttggcctggcattaacactggtgacggtaggcgtgggcgcggcgataagcgttcaacaggcagcaaagcgctggagtggtttttcgacgcttgcccggcgggcgccctatttttcgagcattctgattggtctggtcggcgtgtatatgggaattcatggctataccgggatcatgcagtaaatatgtaacgcttctgctcaggccgtatcattcacgtcgggtttcattccagaagcgtttttacttatcaaacggtatgaaaggccatacattcagcgtcccgcctgaattctgtattttactccactacaccacaggcaaaaaataccccaccgccaccgggtttagccggcgtgtcagtgtttctggatagggtcgccggaggcgggttattgcggagcgataaacggggttcgctgcagtgatttacaaaaccgggtaccaaacagcagttcccgtaatcggttccgcattcccagcttcaccagtaaccggtatttgtcctgccagatttgcttctcctgtgtattcagccttccacacaacgctgacaaccttcctcgtccacggtaaacttcctgaagcaagcgtaactgggccaggctcactccgcatgccagtatctcccggtgcatcaactgatccatatagttcatcaaccgcttcggattgttaaatatcggtggcacttccagaaagcccgtcaccggatccggagataacaaaaaggcgtccagcgctcctgtcctgcgcaggcgtgcgcccccggcccactgttcatcccgccgccaccgaataagtatctccgccagttcctgctccagcagcgccgggatgccgccgtataccttcagtaccacccggtcgctgaaaaacagctcatcgctgataatcataaccgggtagtccggcagtatctgtctcagggaatagaacaaaaagagatgttcacggggacgcagacacagtatcagtatggcctccggtttccgacgtaattgctgcaacagaacaggctgcctgtatgcggtttcacagttgcagcccggcataaatctccggaccaggtgtgccacggcgatcgtcaccggccagcagtcaccgtaaacgataatctgccgggccggtatccggttatgttccgtcatcctcatcctccttctttttcaggatcttccccgcatttctgttactgcacagccggttccacagttcatttgccatcgacctgtcaccattaccgacccggcgttttgataccagcggcggtccggctttttcacggcgcgtggacggggtgggactgtcaagaacccggataacataaatctcatagcgtcgtgctttattaggcagggtctggtgacggcagatgctgaccacccgcgatgttttgcttcgcagataggcaatcaggtagctggcccgtctggccgtgatgtgaaacgcctctgctatctggttacgctgaacccagttctgctgcaacaggcaccagtgtgccacaatgatatacaggggctcgccggcatactggcggacacttaccggaataaaacaggcatcatggttggtctgtccgggataatgaatatcgttaccaggggtaaggtactgcttttttgcgtgtgtattatcagggcacataaaacctctccataactgggtaaatgatttcccggaggtgaagaacaactcttaaatagtatttattattaatgtgtgtttattcgggattagttccccgataactcagtcagttcttttatttttattatctgcccccccgattagttataggtaacagtaacgggtattgcagcagaaaacgttcctgtctttacacttccccccggggtcggggttattactgcagtatataccttcgacacattaccggtgacagctcctgtaatagtaatatcccccagtacttcttgtttatcaaaagtaatctcttttcctttatcatcttttattgaaagccggagcccattaggctgacctttgttggggccatccaggctgacaagattcagagtttgcccggtatcctgtgtcagtgcacctttcccgaaggtgatggccagagggatcgtgaattcctgtcccatagccggtcgtaaaacctgcctggcgatcactgtaaaatttgcctgtctggtctgtgaaggttcataagtcgtataaatatgcccaaagttgacctgtaatggaacaatgtcaactttacccaatccgtttctgagaattctcacattaaaaccagataaaacaaatccgttttgtctcaaagaataagaaaaaggtacaatatttaaaacattacttatccccgtaaaagctgtaactgcactactctctgaatatgcttttgtatataagaaatccagtgttatccttacttttcgttctgtagtcccaacaggtagttttgtgccaaactcttttcgtaactcatttcctgactgagtactctttatttcatcccaggagaacgaaacaacacttgaagcatttcctgtttcttgaatggacattctgaatccaagtcccatcgcatctagtgtcttggtaaatttactgaagtagccctgattaaataccagctgtggaaattgcgtgtcatatcccatgtaacatttaaaaactgcatcatgattgattgtatagataaccgaatccgggccaggtttaaaatcatcggttgtcaaatttatacttcttaaattaatattctgaccggaagtgactgcacattcatttatacctagctcaaccgcatacactttagtcacacataaagagcacaacatcatcaccagcacggtcagttttgttttcagattaaaaatccattctgtcatgatgtcgcccctgcgtccttaaacgcgcagttcagggcatcgcaggtgtagcgattcatctgcagtcccccgtaatcatcaatataccccacccacagcgtccgggtttctgccggcagaacagcctttaaaggcaggttccccaggggcggcaccatcacgccctcgcggaaaccgctgagcctgtggctacggtctgctcccagccacgccacagtgatgtagtacggcgtcgggtttctgagggtcagatgtcccgcattccgctcagcagtcagctttctttccggctggtcactgctgcttctgataatggctttcggacggtaaaacagtttcagctggctctgcatggccagctgcaggacgttgtcgtcttccggcttcgggggaacgccccgcacgttaaaccagaacagtgtttccctgtcctgagggagcttatctgtcagcccgcgaacctgggtgatacggacctgggatttctgtccggcatcaatacgctgcagcggcggcagcgccatcagcgcatcggttctcaccccgtcagcatccgtcacccaggactgcgccaggaacggcgtggttttgtcatcgttattcagcgtgatggccaccgttttctgcggcgcatccatgataatacgggtccggtcaacattgacggccgccgggctgtactggctccatgccgccgccagtgcgagtaaaatcacacggcttcttctgctgtttttcacctgttttctcctttagacctgctctgtgacagggatatttttatctgcagggcagtaacagcggcccccggctgagtgtcaccgtttccggcagggtgagtctgcactgcacccggccatcccaggacacattcagggtccggcggtcttccccgctgagacctgtcaggtaggccagaccgccatctccgaccatccccgcggttctgccggttttcccggacaccaccagggcgccaaacggcggacttgcgccatcagccagccggatatgaccgagcacctgctccccctggttggcgtcaatcttccggtagcccaccgcgccctccgtcagcacctggctgatgacggagctgctgacgtccacgtcctccggcagggcggccacatcaaccgaaatatcgctgcggcgatagctgctgccggcgctcaccacgcccaccccgaagcggttggtcaccccgctgttgccgttcaccggcacaccggccacgtctccggtatctatcatcatgcggggctcattcccggccatcgactggctgaaagcggcaccgtgggcggtggcagtcaccgagccgtaccagctcaggcccaggctgcggtactgtccgggctgcagggtggcgtccgctgccgcttggccccacggcagacggctctgcacgctgccgctgaagctgctgttgctgccggtgtcataacggttatgaccggcgctgatgttccatgtagtgtccgggttatggaaatcgctgtaattcacggtctgctgcaggccgccccggttatctttctgtacgctgtaactcacctggcgactgtctccccacgggatactgatggtggcgtagacctggttctggctacccccgccggtgtactggttacgggcaaacgacaccgaggccgagagtccctgaaggtcgccgagactgaacaccttgttgaggctgagcatgtagttattgttggactgtgcgttccagtaattgagccggcttaccgagagggccgcgctcatgttgagtaccggaacggactggctataagtcacggtgtagctctgtttttcatgccatgcatcgccgccgtcagtggtccgacgctgcaggtactccggcatggacagaaaatggcggtccgagaagcggtatccgacgaacgccagggtactgccggttttatcaaacgttttggcatagttgatacggtagctgtaaccggactgcttctgcccatgcggcaaccgcgcatctgagcgggtgacgtccgcagacagagcgcccaacagccccatattctggccgatcccgagcgccgcggactggtagtcgccggtggaggcaatgaggccgccatacagcgacgtgttgttaaatgctccccaggtggcctccccgagcagaaagtcagggctgaccgtgctgttgttatgcgtcccgccgtacagcggacgtccggcggccaccttatagcgaacctgtccctggcgtgccataaaggggacgctggccgtgttgacctgccaggtccggacgctaccgtcgctttcccggacgctgacatccaggttgccgctgatattctggctcaggtcgggaagctcaaaaggccccggcgacacccgggtctggtacagaatgcgaccattctggctgacggtgacctgtgcattactgttcgcaatgccgctaattttcggggcatacccctgaagagagggcggcagcatgcgctcatcgctggccaaagtgagcccggcaaagcggaaggagtcaaaaatagcggagctgaggtacgtctgtccgagcgtcagttttgagcgcagtgctggcaaggcacggaacagatacgtctgcggcagataaaaatcggactgtgatgcgccctgcccactgtcaaaacggctgtactggtaatcgctccgcaatcgccaggcgccgagattaaacccggcggtgccgtagaggctgtagctggtagaggtttccccctgctgcggcatatagcggttgaccatcaggctgtaatcaagcaggccggcggtgacgccgtcgctccagcgtgaagggggcacccagtccgggtcctgataacgcatccaggcctggggaataatgaaggtcagacgctgattttcagcgctgtaccgtacctgactgtcagcggagcgcagctcaaggcattgcccgtccgggataccggtaacgggtttcaggccatgaataatcttatccttaagacccagcatggccaccatgtctgttgtcacacagatgacggccgcgtcgagtccggcaaccggtacaaccctgaccggatactgttcccgtaccggctggtcattgagccagatatcgagaatatagttaccgggcgccacatacccctcgcggctgaaggccgtgaggtccacgttagacaggttcccgctgtccagcaggctggcattgaactccgtggcctgcgacttcaggacggaaaatgtcagggtaatcagaatggcaagccgggtaattttcatggcatggcgctttcgtgttgtcgtccgtgtaacagacagcccgcaggcacagtcagatataaaagccgtccgatcccctccgtggacggcttctccctgtcgttatttaccgcgtgaaatcacaggtatttcagggtgtaggtgacggatgcgttaacatcgccaggagttgcggcatctgtcagggctatcaggcgggcaaagaagttgagttcgttattcccggcctgcagttgctgggcgtcgccatccggcatcggggtattgggtgtaatcagtgaggtgttgtcacctttcagaagctgcacaccaacatgctgggcactgccggtgctgacgtaagctttacctgaggtatctgctgtgccactgaaagagacggttactttagacattttccctgcggagccggctattgtagtttcattcggatcgaaggcgcagttctgcagatgaatggtgaacggttttgagtccgtggttgcattggcggtattcagtttacggtaagaaatctgtccaaacggaacggtgatcgcatcgtcgcccggtgcgatatcacagggtgagttggtgatggtaccagtgaaaagaattttacctgagccgaacgggcctgctgtgggtgtagtatcggcggcaaatacagaagcaccatacatcataccggcagccgccatggcaagtattattttattacgcatagataatatgtcctttgggtgaatgagaattattttgcaaaggctgaaaacaactctgagggtattaatgaaagcgttcagaaaagattcgtatgaataataaacgcctggtgttaaacgaagcacctgaactttccatcgaaaaatattgatttcagctaatgcctaatcagttgtaagaaaattcttattcaaattaaaacaataaaaatagatcgatacgatcgatgattatgatcgtaatttaagaataatcatcaaagaaatactttttaatgtaattataagcgggtgaatacctaacagacagatattcgcagcggacatgaaatattttgtaatatattatctggaatgtatgttttgcttttccattacactggatatttacaaaacataatactaatcatatataacaatgaaattactggtagcataaaaaactggatataatgcaagtaaaaggcatttaattccaaaacattaacttaataaatcattatgaaccatcataagtggaaggaataaaaaataataaatgaaatgatattcttctgtatttgtgatgggcatcacaatagatataaatgcaggtaccctgacatttctgaacttcgcggatgaaatttaaaaacaatgccgacagcaaagaacaaactggtaatagctgtcagacataatgctgcctgctgtaatgtatacagcaggctgggggatattaatgcgcggcgtcgtgctgcacggagtgcgtgggtgattcctgaactgactgagagtctacaactatgccatcctgagctgatttcagtaacagacctgcctgatagtattttccttcgttcatcaaggaaagcgctgtggtcacatccttacgggtttgctgaagaggaatgagttcctgattttcaataacactgacgcctgctagtttcagggcctctatagtcccttttttatctccttctttcattttctggtttgctttattaatagcatcatttttctggcccgcagggagataatcttctgctaccgtaatcgatgaatttatccgaatatagtggtctccttcaactggggcttttttatctgatttgacatacagattccagtcagtgctgtcatcgttcaggagtttttctgcttgcgcagccagttgttccgccttttgggtgcgaccattaaacaactcgaatcgcgacattccgatatcacgcatggcctgccaggcctgtccggatatcttgtcattattcagagtaacgttatcagtcatgtttgttgcggccataatatttcctgaaaacaggataaccatcagcgcaacgcctggcataatatggcttttcataatccatcatctccacaaagtaacattttttatcggattatcctattcagaaccggtaacccacgccaagattaaaaccattgctattaaggcttccgctgttatgggtagcatcaaaatccgctccctcataacccagagttatagcgacactactgaccggggtataagccacgccagcagaataaccatatccgaccttactgtcagactcatttatcccgtgatcacgctgatgcaataatacggggcccacttgactatacagacttaactggttatttattttccatgaggggcctgcaagcagggagtaataacgggttgttacacgaccattactgctttcatcggaatagcgctggcttccatttagccatgcaaatgaggttgtcagcccccagtccggtgacatttcatagttgtttgccagccgtaccccacgcaacgtcccggcgtgattagtatgggactgggcgtatccaagtgaaaatgtactggcattatcgtctgcccataccggactggctgcagcagacagcagaacaataccggtacttccggctaatagcattttgttcatcttcttctctccggttattttacctgataccttactggcatgtattaagttaaaatctttccgtgataacaaactataaataaatcttttaaattatgagcactgttacgccagcaaataactttatctccggctgtcgggaggctattcacgaaaatatatccaggccagaaacagtatttaataataaataaactggaaaataaaaactgacaaaaatagaagttcactgatatataccaaaaataatttgagttgctgaaaggcggcaagggagtgagtccccgggagcatagataacgctgtgaccggggagagcaacaaatctgccgggagcagacttgaacgtcgcatgcgacggcccgtcagggcgaggcccatggatggactgagtaatccgtagctaacacataagccacttgaagtatgaagggtatataacgggaaagaaggcctatcggcctggtaaatcaacgtctgtgatttaagttgcaggaaacggctatggagagggggatgcggcagttatcgggcagtaacggcattgttcagtgagtatccaggaaacaaaaaaagaagggagcggtactcccttcgtaaacatgtcagaatacgacattttggtactcttttatttattatctggccgtaaaagttatgctgttggcagatatctccagtcaacataaaaaaataccaccagctaaaaatgtgatgcaaaccaccattaagcaggtaaccaaattgactgtgccactaaatccggaaaagagtttgaatccggggataacatctgatgcagaaattagcaccagtcttcgattcggatacccggaatgcgttcaaattcgcggagattgtttgtgacgacgaccagtccgcggctaccggcatggccagcaatcatctggtcataaggcccgacaggtgttcccttgcgggccagttcggcacggatttgaccggtatgtatcgctgcctgtgtatcgtaatccaaaacctcaaggcgggagataaatccctccacgacggcaagattacgctccggcgccaggcttttttcagcaccgtaaatcagctccattaaggtgatggagctgatacacattcgggatgtattgaggttgaagcgttctctgatgtgttcgggcttatttttgatggtgaaaatacaggtattggtatcaagcatgaatttcagcatcaaaatccttcccgttcctgtactgcgggttgttctctggtactcataaaatcagtactggcgccttcgccatcgaaccagctgtcccaggattctccgactggagtaatgattctgcttctgccaaccgcaatgatttcgacatgtttcacatcctccggaaaggatatcgatttaggcaatctgactgcctgggtccggttactaaaaaaaagtgttgtgtgcataactgcctcctttctggatatacaacgcgtatatccattatgagtagaggcgatgtatatgtcaaagagatatacaggaaaaaataatccagtcacatgacgcgcactccgcagggcatccttgtccgactccggcatttctgaatacatccaatgaaggaaataccatgcaaacaatgcataaaaaacatatgtgcccatggcttctgcccggtttgctcggtctggctcggtgtgcgccagtaccgcatacttacgcagccatcattgaggcaggattttatccggaaggtacagatctccagcttgttcttaagataattgagaccgcgcgacaggaaatccgtctgatggactattccttcacctcttgggaggtggtccggttcgaacattcagtgagtacaaaattctccatgtcaaagtgatcgtcagcgacgaccgccacaccgaggtggacgcgtcagaatcgctgatcggacacgtcgcaatctacactctgacttataagccagcctgaaggggcatgttggctttgacgatcaggcaaaaaacaacggcgaataaagtcgtatgatgatcttcacatttatcatcatcagcgttcatattactcaacctgtaatcaacctctggcgtttttctgtatccatcacaaccatttccggtaaaggtaaaaaagggatttgaacctttccggagatgataatgaaggtaaatgcatggacaattttgcttatgtcggcgcatctgacggcctgtgccgtccctggcacagaaaaatatcagaccagcatggacagcgttacggcagaaaaaataagccggattatccagtcggatgtcattccttataaaggcgaaaaccatggagaagttatcagccgcgtatcgtctgcttttctcggaacaccttatcaggcggatacgctcatcggtgggcccggcatccccgaagtccttgtagcgaatttcaacggcgtggactgctttaccctggctgattacgttgaagccctggcccgcagcgataatcagaaatcgtttctgcataatcttgccaggactcgctacgccgcgggcaaagttgcttatctcagccgccggcacttcttctctgactggttcgccgcagcaccgcgtaatgcacgggatgtaacgccggatatcagccctgattatgtcgttgttgacaagcagcttaaccataaacctgatggcggcgagtacattcctggtctgggcatccatcctcgtaaaataaattacattcccggaagagccatcaaccagcaggtcatgaaccacctaaaaaacggggattatatcggtgtctactccccgcttgacgggctggacgtttcacatgtgggtatcgtagttcgccatgatgaacaggtgtggttcaggaacgcctcctcattggccgcaaacagaaaagtggtggacacaccgtttatggaatacatgcattccagaccgggcatcgttgtgctgcgggctgaatgataaagtcattaccggagtcgccagctgataatagccgtccgacataggtattgaaaccctgtgtactgtggggccgacacggaaaattgctgtaaatttgtggatttagtaaatactagaagatatttgtctggagcgggcgaagggaatcgaaccctcgtatagagcttgggaagctctcgttctaccattgaactacgcccgctttgagatgcgtaaagcattataaaccttacgctctggttggcaagagacttactggctgactggcgattaattcgccgtcagcacttcggtttactcccctgcggcggcagataacgcagcggatcgatggccgtcgcccggtagcgaatctggaagtgtagtcttacggatgcggcatccgtgctgcccatcgtagcgattttttgccccgctttaacgctttgtccattattaaccagcatggtgtcattatgagcgtaagccgtaatgtaatcttcattgtgcttaatcatgatgagattgccgtaaccgcgcagctggttcccgacatagacaactttacccgctcccgccgcataaacaggcgttccgcgcgcgcccgcaatatcgatccccttatttccgccctccgcggtggaataaggtaaaatcactttaccgttagcaggccatacccaacaacgctgccccaccggcggccaggaggattttggcaccgaagatgacggtctgaccgcagcagtttttgttgctgttttattgctggttttgcgtgttgaagtgctactctttgcgctgccgcgcactttaattcgctgccccacctcaatagtataaggcggagaaatgccattcagtcgggccagttctttcacgctggttcccgtagcgcgcgatatacgatacaacgtatcgccgcgcttaacggtatagacggagccggaatacgttcctgagccggaattactggaacaccccgccagcagcagccctgtgcataacagcaccgcaatacccaggctatttttgttcaggcgtcctgcgctcaaaaccattcctcactctattgacagacgccttatgatagcagccaaatgccgtatgcccaatccattgacgccggaaaggggccgcgtggatgatgatgccgcgaatatccgatatgccagcataatatcgactcacggcacaatggcgctcgtctgcgttctgtcagggcctgttttggtaatgcctttctttctgttatgcgctacgctgatcgtctgagtatatggcctggccatgctgccgggtcattttaattttcaggagctttcatgactgaggaacatgtcgttttattggatgagcaggataagccttccggcacactggaaaagtatgcggctcatacgcttaatacgcctttgcatctggctttctcctgctggctatttaacgaagatggtcagttgctggtaacacgacggtcgctgagcaagaaagcctggccaggcgtgtggacgaattcggtttgcggtcatccgcaacaaggcgaaaccaccgaagaggcgatcatccgccgttgtcggttcgaactcggcgtggaaattaccgatctcacccccgtctatccgcacttcagctatcgagcgacagatccaaacggtattgtggaaaatgaagtctgtccggtatttgccgcgcgggcaaccagtgtgttacaggttaacagcgaagaggtgatggactatcagtggagcgaatttaaaagcgtatggaaaagccttctcgctacgccgtgggcatttagcccgtggatggtcatgcaagcgtcagacgaacaagcgcgtgaacgactgctcaattactgccagcgttaaagattgcctgatggcgctacgcctgaacgaagagatgccggatggcggctgatgccccatccggcaatttacatcttatttcaccggacgcatcgccgggaacagaataacgtcgcgaatcgtgtggctgttagtaaacagcatcaccatacggtcgataccaattcccagacccgctgtcggcggtaaaccgtgttccagcgccgtcacgtagtcttcgtcgtagaacatggcttcgtcgtcgcccgccgcttttgcattaacctgatccaggaaacgctgcgcctggtcttccgcatcgttcaactcgctaaagccattgccgatttcacgaccgccgataaagaactcgaagcggtcagtgatttccgggttcacatcattacgacgcgccagtggagacacttcagccggatattcggtgatgaaggtcggctgaatcagatgcgcttcagcgacttcgtcaaagatctcggtgacgatacggcccagaccccagctcttctcgacgtgaatgccgatgctttcagcaatcgccttcgcggaatcgaagttgtccagatcagccatatctgtttccggacgatatttcttgatcgcttcacgcatggtcagtttttcgaacggcttaccgaagtcaaacacttcatcaccgtacggaacctgggtggtgcccagaacatcctgcgccagcgtacggaacagagactccgtcagctcgatcaggtctttgtagtccgcatacgccatatagagttccatcatggtgaactcaggattatggcgcacggagatgccttcgttacggaagttacggttaatttcgaatacgcgttcgaagccgccaaccaccagacgcttgaggtacagttccggcgcgatacgcaggtacatgtccagatccagcgcgttgtgatgggtgataaacggacgggcagacgcgccgcctgggatcacctgcatcatcggcgtttcgacttccataaagccgcgagcaaccataaactggcgaataccggccaggatcttcgaacgggttttgaaggtgttacgggattcatcgttagagatgagatccagataacgctggcgatagcgcgcttcctggtcctgcaggccgtggaatttatccggcaacggacgcagcgctttcgtcagcaggcgcagttcggtgcagtggatagacagctcgccggttttggttttgaacagcttacctttcgcgccgaggatatcgccaagatcccacttcttgaactgctcgttgtaaacgccttccggcagatcatcgcgcgccacatacagctgaatgcggccgcctacgtcttgcagggtaacaaaagaggctttacccataatacggcgagtcatcatacggcccgcgacggacacttcaatattcagcgcttccagttcttcagcttctttcgcgtcaaactctgcgtgcagttggtctgaggtacggtcacgacggaaatcgttcgggaacgggataccctgctcacgcagtgcagccagcttctcgcgacgtgccttcatttcattgttaagatcgactacctcgtcagcgccctgtgcgttttgttcagacatgttgattcctcatagccctgctttcaaacttgcttcgataaattgatccagactaccgtccagtaccgcctgtgtattgcgggtttccaccccagtacgcaggtctttaatgcgggaatcgtccaggacataggaacgaatctggcttccccagccgatatcggacttagtgtcttccatcgcctgtttttcagcgttctttttctgcatctccagttcataaagcttcgctttcatctgcttcatggcctggtctttgtttttgtgctgcgaacggtcgttctggcactgcgtcacgattccggttggaatatgggtgatacgcacggcggattccgtacggttaacgtgctgaccgcctgcgccagacgcgcgatagacgtcgatacgcagatccgccgggttaatgtcgatatcgatatcgtcgtccacttccgggtacacaaacgcggagctaaacgaggtatgacggcgaccgccggagtcaaacgggcttttacgcaccagacgatgtacgccggtttcagtgcgcagccagccataggcatattcgccggagattttgatagtcgcggacttaataccggcgacttccccttccgattcttcaatgacttctgtcttgaagccgcgcgcttccgcccaacgcagatacatacgcagcaacatgctggcccagtcctgcgcttcagtaccaccggaaccggcctgaatatcgagatagcaatcggcgctatcgtactcgccggagaacatccggcggaattccaactgcgccaacttctcttccagcgtattcagttccgcgacggcttcgttaaacgtctcttcgtcgtcagcttctaccgccagttccagcagcccggaaacgtcgtccagcccctgagtcatttgatcaagcgtatcgacgatcgcttcgagcgatgaacgctcttttcccagcgcctgcgcgcgctcaggttcgttccagacatccggctgttccagctcggcgtttacttcttccagacgctctttcttagcatcgtagtcaaagataccccctaagaacgttggtgcgttccgtgaggtcctgaatgcggttattcaccgggttaatttcaaacatggtctgatttcttttatttgacttgtcaaaatgcggttataagggcgaaatattagcggatttcgccccttaattacagcgaaagtgttgttaaatcgccccgatcatagcggccaaatatcatcgataataatctgtaaactacggttgccgcgaaactcgttaatgtccagtttataagccagttctacctcccgcacgccgttatccggccaacaggtcgtatcaatattaaatgcgatgccatccaacagcgggccgccgccgacaggctccaccatcaccttgaggtgacgctcgcccaccagacgctgctgtagcagacggaaacgaccatcgaataacggttccgggaacatttgcccccacggtccggcatcccgcaacagttgcgccacttccatagacatctccgccgcgcttaatggaccatcggagatcacctcgccttgcaacagggcaggatcgagccattccgtcaccagctcgccaaaccgttgctgaaactgctcgaatttatgctcttccagcgacaatcccgccgccatcgcatgaccgccgaacttgatcatcagatcagggtaaagggtatccagcctttccagcgcatcgcgcatatgcagcccctgaatcgaacggcctgagccttttagcgtgccgtcgcccgcaggcgcaaaggcgatcaccgggcggtgaaaacgctctttaatgcgcgacgccagaattccgaccacgccctgatgccattcaggatgatacatcgccagaccgcccggaagcgtttcactactgcgctcaagcttttcgcacaggataagcgcttccgcctgcatcccctgctctatttctttgcgcgtctggttaagcgcatccagctcgctggccagaacacgcgcttcgccgaggttatcgcacaacagtaacgccacgccaacggacatatcatccagcctgccggcggcattcaggcgaggccccaacgcgaagcctaaatcactggcggcaagctgctgcggatcgcgattcgatatctccagcaacgctttaattcccggacggcatttcccggcacgaatacgacttagcccttgccaggtcagaatacggttgttagcgtccagcggcacaacgtctgctaccgtacccaacgccactaaatccagcagctccgccagattcggcggcgcgatgttgcgctcgtcgaaccatcctttgtcgcgcaaaaatgttcgcaacgccagcatcaggtaaaacgccacgccgacgcccgccagcgacttagacgggaattcgcagtcgcgcagattgggattaataatcgcttcggcatccggcaacgtgtcgcctggcaggtggtgatcggtcacgatcaccggaatccccaacgtctttgcatgcgctacgccggcgtgggatgaaatgccgttgtctacggtgacgataagctgcgcgccgcgcgccttcgcctgatcgaccacttccgggcttaaaccgtagccgtcttcaaagcgattaggcaccagataactgatgttgtcacatcccaacgcacgcattcccaatacgcttagcgcagtactggtcgcgccgtcggcgtcaaaatcgccaacaacaataatgcgggtaccttcgcgaaaggcgttgtagaggatctccaccgcgttatctatgccgctaagctgttgccagggcagcattcctttcacgctgcgctccagttcgcgggcgctacgaacgccccggctggcatataaacgtcgtagtaatggaggaagatcggcggggagttccgccgtctcatcagcctcgcgccgacgaagttgtctctgttgtttcacgcgtattatttaccactggtctgtttttgatgctcatcaagaaacgctttcatctctttcggtccctgatagccaggcaccacatagccgttactcaatacaatggctggcgtaccgctaacgcccaactgcacgcccaacgcataatgatcagcaatgttcacgtcacagcttgccggtttcacgcccttacctgccatggcgtcatcaaacgctttgtttttgtctttggcgcaccagatagatttcatatcctgctccgcctggctttccagcccctggcgcggaaaagccagataacgtaccgtgatccccagcgcgttataatctttcatctcttcatgtagcttatgacaatagccgcaggtgatatcggtaaaaacagtaatgacatgtttctcatccggcgctttatagacgatcatctctttttccagcgcatttagctggctcatcagcagtttgttcgtcacgtttaccggatgcgcgccgctcacgtcatacatcggcccttgaataatatgtttgccgtcatcagtgacgtacagtacgccgctgtgagtgaggacggttttcatccctgccactggcgaggcctgaatttccgtactctgaacgcccagcttagccagcgactgacggatagccgcatcatccgcatgggccacgcctgaaaacaccgccgccagtaaagtgaacatcataaaacgctttttcataaactatcctttcctgtcagcactcatgcccgcggatggtgctgttgatgaagttgacgcaaacgctccgttgcgacatgcgtataaatttgtgtcgtcgaaagatcgctatgcccaagtagcatttgtacaacgcgcaagtcggcgccgtgattcagcaaatgcgtggcgaaagcgtgacgtaaaacatgcggcgatagtttttcgctatcgattccagccagtaccgcataatgtttaatacggtgccagaaggtctgccgcgtcatctgctgcgcacgctggctggggaataatacgtcaatcgatacgccattgagtaaccatggacgcccatgctccagatacgtttccagccaatataccgcctcttcacctaacggcaccaaccgctctttattgcctttaccgataacccgcaccacgccctgccgcagactgatatcgctcattgtcagccccaccagttccgacacgcgcaaaccggtggcatacagcacttccaacatagctttatcgcgcagctccaaaggttgatcaataagcggcgcctgcaagagccgttcaacctgcgcctcgctaagatctttcggtaaacgctgcggaagcttaggcgaggccaactgcgcgctcggatcatcctcacgatacttttcacggtacagatgctggaaaaagcgccgcatagcgcttaacaggcgtgcggagctggtcgctttgtatccgccctccacacgttcagccaatagcgtttgtaaatcatcagcctgcgccgtcgcaagcgtttttccgcgatgatgcaaccacgcaacgaccatcgataaatcgcgacgatacgcgcttaatgtattttccgccagatttcgttccagccacagggcatccagaaactgctcaatacgcgctaaatcctgttccattcgcgctccctacttcacgcttacttttggtgcattatgcctcattgtgccgtgaatgcagcgattctgttacactacccgcaacgctatagcagaatcgagatgtaacgtaatgaatatgggtcttttttacggttccagcacgtgctacaccgagatggccgcagagaaaattcgcgatatcctcggcccggagctggtgacattacataacctcaaggatgacgcccccgccttaatggagcagtacgacgtgctcattttaggcatccccacctgggattttggtgaaattcaggaggactgggaagccgtctgggagcaactggacgatctcaatctggaaggcaaaatcgttgcgctttacggtatgggcgaccagctcggctacggtgagtggttcctggatgcgctgggtatgttgcatgacaaacttgccctcaaaggcgttaaatttgtcggctactggcccacagaaggctacgaatttaccagcaataaaccggtcattgcggatgggcaactgtttgtcggcctggcgctggatgaaacgaaccagtacgatctcagcgatgagcgtatacagacctggtgtgaacaaattctcggcgaaatggccgaacactacgcctgaaaccttactcgctgtacttccctctcgacggaaccgcgtttacgccgttccgttagtgttggcctgatatcggctgctgtaacagtatccgacgcaactcacgccattccgcttcttccatgctatccgccgccagccataaatgctgatgacgtccagactctgcgcgtaaacgcaacaccatcccgctcttcagtaaccagggcggacgcaagagcgtccagtcctgcccctgccagcgtaagcgcccgtccatgagtagcttgatctctccctggcaggtattaatcctgcgctggctacgtacacagtcaaacacgaccagcgacagtagtatcatccataacggggtataactcagcggccagggcatcaataaaatcaccgcggcaaccagcccatgaatgagcaatgagatccactgagcgcgccatgagacgcgtaaatcagattgccacaggaccacgttcccgattccgtgtctgaatgagtcggaccatctgttccagttcagcgtcagccggtttaccgtgattcattaaccagttaaataaatccgggtcatcactctgcaacaaacggacaaaaatacgcttttcttcatcacttaaactatcgtactcatgttcaaaaaacggcatgatggaaatatcaagttcgcgcataccgcgacgacatgcccagtgaatacgtgctttattgtgaatatccatgttcttcctgcctcgcgaaaatgaagtaccgggctattgtaacgtgtttttggcgttgttttacgggaatctcagtaatctggaacgcgatcgcgaaataaaaggctgggaatcaatatgttcatccattttggataccgcctcgcaaaacgatcaatccgctctcaatgggctatttaaagcacttgcaatgaccgatggctcttttaccattaaccattattgttgcagctaaccaggacattatttatggcttttatctcctttccaccacgtcatccttcatcgtcagcccgcctgccgctgacgctgatcgcgcttgacgactgggcgctgtcgaccattaccggcgtagacagtgaaaagtatattcagggccaggtcaccgctgacgtaagccagatgactgaacagcaacaccttctcgccgcccactgcgatgctaaaggtaagatgtggagcactctgcgcctgttccgtgagcgcgacggtttcgcctggattgaacgccgtagcgtgcttgaagcgcaattaacggagctgaaaaagtacgccgtattttccaaagtggtcatcgcgccggatgacgaacgcgtattgcttggcgtggccggttttcaggcccgcgcggcgctggctaatgtctttagcgaactgcccaatagcgaaaatcaggtggtcagagacggcgcctccacgctgctatggtttgaacatcctgcggaacgattcctgcttgtcaccgatgtcgcgacggccaacatgttaacggagaagttgcatggcgaagccgaactgaataacagccaacagtggctggcgttggatattgaagcaggcattccggtgattgacgcggcgaacagcggtcagtttatcccccaggcgactaacctacaggcgctgggcggcatcagcttcaagaaaggctgctacaccggacaggagatggtcgcacgggcaaaattccgcggcgccaataaacgcgcgctttggttgctggcgggcaaagccagccgggtaccggaagcaggagaagatctggagctacagatgggcgagaactggcgtcgtaccggcgctattctggcggcgacgcagttggacgatggtcagttactggttcaggccgtcatgaataacgatttagaagccgaaagcgtcttccgcgttcgcgacgatgccaacaccctgcatatcgtcccgctgccctactcgctggaagagtgatatcacgttaaaagccggatagcctgatagcgcaacgccatcaggctcgcacgtgctgttctcgtaggccggataaggtgcgacagcgccgccatccggcacgggcatccgggaattatgcctgtcccacatacaaatagatggccaggaagtggcacacgctgccacccagcacaaagccatgccagatggcgtggttataaggtatgcgtttgcaaacatagaaaattacgcccagcgagtaaacgacgccacctaccgccagcagcgtcacgccgcctatcgccagcttaatcgccaactgataaaccactatcagcgacagccagcccattgccagatacgtaaccagcgaaagcactttaaatcggtgcgcaatcgtcaacttgaagaggataccgaatagcgccaggctccagatcacaatcattagtccgcgcgccagcggcgaatccagacctaccagcagaaatggcgtataggttccggcaatgagcagatagatagcgcagtgatcaaatttctttaaccagatttttgcccgctgatgaggaatggcatgataaagcgttgaggcaagaaaaagcaggatcatgctcccgccatataaactgtagctggcgatagccgtcatacccgcattcgcctctaccgcctgaaccaacaacagcaccaggccgacaataccaaataccaatccaatgccgtggctaatactgttggcgatttcctcagccagcgaatatccctgcgtcattaatggtttttgcaccataacttactccggagaaacgttcataacgatgaactgcgcctctagcgtaactgagaatggttccagtgaacacatgttagctaaaataaattcgcaaaattaaattttgtttattattcaataagttaattacaaaaactcaactaacacgcgttcatatttatcaaaggcatttaaaatcaatcacataaaattgcgtctggttgggatagatttcagcaatgacccgtttcagctcatcaagcgacatattttcctgttgcgcatgtttttcgttcagcgtatccagcgtcacagttgacgttcctgtcacttcgattgtgcaaaaatagccatcatcttcgaaccgccccacgcgtagcacatcgcctgctttaaagtgggactcggaggcatcacgaatagtgatggttttacgccctgccagaatgtcattctggaaacgttgaaagaaagtaatgtcgtttggctgcatgtggttatccccctgaatatggccccttgaagtggatgttacgatctgaatgtgttcttgctccgacacgcgagcatcctggaattttgcgtacgctttacatgccacttggtgcagaatgaatgataacagactaaataaattgagattatgcaacaatgagaaaactcaccttgccaaaagattttttatggggcggcgcggttgctgcacaccaggttgaaggcggctggaataaagacggtaaaggccccagcatctgcgacgtgctaaccggcggcgcacacggcgtgccacgcgaaatcacccagaatgtcgttgctggcaaatactatccgaaccacgaggcggtggatttttacggacattacaaagaagacatccgtcttttcgccgaaatggggttcaaatgcttccgtacctctattgcctggacgcgtatcttcccgaatggcgacgaatcccagccaaacgaggccggtctgaaattctacgacgacatgtttgatgagttactcaaatacaacatcgaaccggtcattaccctttctcactttgaaatgccattacatctggtacagcactacggcggctggaccaatcgtaaagtggttgatttctttgtccgttttgctgaagtcgtgtttgaacgctacaaacataaggtcaaatactggatgaccttcaacgaaattaacaaccagcgaaactggcgcgcgccgctgtttggctactgctgttccggcgtggtgtataccgagcatgagaatccagaagaaaccatgtatcaggtcttacatcatcagtttgtcgccagcgcgctggcggtaaaagcggcacgtcgcattaacccacagatgaaagttggctgtatgctggcgatggtcgcgctgtatcctttctcctgtaaaccagaagatgtgatgtttgctcaggagtcgatgcgtgaacgctacgtctttaccgatgtgcagctgcgcggctattacccgtcctatgtgttgaacgagtgggagcgccgcggatttaacatcaaaatggaagatggcgatcttgaagtgctgcgcgaaggcacctgcgattatcttggtttcagttattacatgaccaacgcggtcaaagccgaaggcggtagcggcgatgcgatttccggttttgaaggcagcgtaccgaacccctatgttaaagcatctgactggggctggcagattgacccggtgggcctgcgttattcattgtgtgaactgtacgaacgctatcaaaagccgctgtttattgtcgaaaacggttttggtgcttacgacaaagtagaagaagatggcagcatcaacgacgactaccgaattgactacctgcgcgcccatattgaagagatgaaaaaagcggtgacttacgatggtgtcgacctgatgggctacacgccgtggggctgcatcgactgcgtgtcgttcaccaccggtcagtacagcaagcgctacggcttcatctacgtgaacaagcacgatgacggtacgggcgatatgtcgcgttcgcgtaagaagagcttcaactggtacaaagaggtgattgccagcaacggcgagaagctttaactcctgcacgttacccgccagtcggcgggtaacactttgaacgagtcttaccaggtcttacctattttaaattcccagcgtacatcttccattttggttggcgacttcgcttcctgcattaccgggaagaaggctccggcaccaaaccataatttcagtgaatcgacggcaatattaaatgacggaccaacaacccattcggtagttccagaatggttattaattacgctgccattagacagttttttcgttccagaggcattattgctgtaggcactttccagaccaagatccagcggtaaatcgctaaacatataccgcacctgggtattccactggaattcgttacctcgtttcacgtcctggttaccgcgctcaaatggtccctgatatacaaaacccatatcccctttaatgttaggagtaaataattttgttaaagtgagtgttactcttcctccccaggcgctattcccaggcaaatgattatctccatcttgcccggtgggtagtaatactgccccacctaccgtaacccaaaacggatcacctcttcgctggctcattaaagcataattgacccccaccgattggtcgcccattccctctatgtgctcaggagacagattgtctcgtttgttattgatataggaacccacagttgataattccagtctgtcggtcaaaccgtaacgaatcttcaataaccatatctgggagtaaacatccggacttccatgcccctcgatttgatgatctttatcgcgaaatgagctattcatggcggttaataactttccttccggcaatactgaaccaccagaaatagcggtattaactggtgcacctaatagattactgggattattttctccgttagctgccattgcattcattaatagaaaatatgtcattaatggcagaaatataaatcgtttcattattccctccaggtataaaaaacaaagtgctaagttaataaatatttacgttatttatgcttatctttaatttataatttaaattaataacttgatgaatttaatatacggaaatttttgtaactatattgagaggtaaataacgattccggagagaaactatttgtaaccacatgtaaatataccgtgttatttttattaaataacagcaaggtaaaaatgatgcacaatgaatcattagactctaaaaaaccggtaatttaattctggctaatacactgatacaaacgccaggttgcctgacaggagccaacgatttactgtaatatattgaattagtaacactttgtagcctgaataaggcgctcacactgcatccgacacaaacaaagcgcattttattaacaagctgaaaaggcgccgaagcgcctttagaagacagtcgaatcagtaaattactggtagtcgctaatcggtacgcaggagcagaacaggttgcggtcaccataaacatcatccagacgtttcaccgtcggccagtatttgtctgccacgcctgccgggaatacggcaacttcacggctgtacggatgcgcccactcggcgaccagttcgctctgaatgtgcggcgcgttcaccagcgggttatcttccagcggccagacacccgctttcacctggtcaatctctgcgcgaatagccagcatcgcatcgataaagcgatccagctcggccttaccttcagattccgtcggctctaccatcagcgtgcccgccaccgggaacgacatggttggcgcatggaaaccatagtcgatcagacgcttggcaatatccagctcgctgatgccggtttcttctttcaatgggcgaatatcaagaatacattcgtgcgccacacggccatcgcgaccggtatacagtaccggataggcatctttcagacggctggcaatgtagttagcgttaagaatcgcgacctgacttgcctgcttcaggccttctgcgcccatcatgcggatgtacatccagctgattggcagaatggaggcgctgccgaacggcgccgcagacaccgcgccctgacgggtgagcatcccttcaatttgcaccacgctatgacccggtacgaacggtgccagatgcgctttcacgccgatcggtcccatgcctgggccaccgccgccgtgcggaatgcagaaagttttatgcaggttaagatgcgaaacgtccgcgccaataaagcccggtgaggtaatgccgacctgagcgttcatgttcgcgccgtcaaggtaaacctgaccgccgaactggtgcacaacttcacacacctcacggatcgtttcttcatacacgccgtgggtggacggataggtcaccatgatgcaagaaaggttcgcagcatgttgttctgcttttgcccgcagatcgtccaggtcgatgttgccgttcttatcacaggcgactaccaccacctgcattcctgccatatgtgcagaagcagggttagtgccgtgagcagaggccggaatcaggcagatatcgcgatgaccttcgttgcggctttcgtgatagtgacgaatcgccagcagccccgcgtattccccctgtgcgccggagttaggctgcatacagacggcgtcgtacccggtgagtttcaccagccagtcagaaagctggctaatcatctgatgatatccttcggcctgttccggcgggcagaacggatgcagttcagcgaattccggccaggtgataggaatcatctcggcggcggcgttcagcttcatggtgcaggaacccagcgggatcatcgcctggttcagcgccagatctttacgctccagcgagtgcatatagcgcatcatctcggtttcgctgtggtaacggttaaataccggatgcgtcagaatcgcatcgtcacgcagcatactttgctgaatggaacggctatcaagcgccacgtctttatccagtgtttcaatgttcagaccgtggctgtcgcccagcaaaacattgaacaactgcgccacattctcacgggtggtggtttcatcgagcgtaatacccaccgcgttatgaatatcgctgcgcagattgatctctgccgcttccgcacgcgccagtaccgcagctttatcagccacttccacacacagggtgtcgaagtagtgcgcatgacgcagctttaagcctttctgttgcagacctgccgccagaatatcggtcaggcggtggatacgattcgcaatgcgcttcagaccgaccggaccatgataaacggcatacagactggcgatgttagccagcagtacctgcgaggtacaaatgttggagttcgctttctcacggcggatatgctgctcgcgagtctgcatcgccatgcgcagtgcggtattgcccgccgcatcttttgagacgccgataatacggcctggcatggagcgtttaaattcgtctttggcggcaaagaacgccgcatgcgggccaccgtaccccatcggtacgccgaagcgttgcgcagagccgaaaacaatgtccgcgccctgtttgcccggagccgtcagcagcaccagcgccataaaatcggcggcgacgctgaccacaactttacgggatttcagctcagtaatcagtgcgctgtagtcgtgaatttcgcccgtggtgcctacctgttgtaacagcacgccaaacacatcctggtgatccagtgctttcgccgcgtcatccacaatgacgtcaaagccaaaggtttcggcgcgagtacgcacgacgtccagagtttgcggatggacatcagaggcgacaaagaaccggttggcatttttcagtttgctgacgcgctttgccatcgccatcgcttcagcggcggcggtcgcttcatccagcagcgaggcggaagccatgtccagccctgtcaggtccagcgtcacctgttggaagttgagcagcgcttccagacgcccctgagagacttccggctgataaggagtgtaggcggtgtaccagcctggattttccagcatgttgcgcaggataaccggcggtagctgcacggcggtgtagcccatgccaatgtacgacgtgaagcgcttgttacgcccggcgatggcttttaattccgccagtgcggcatattcggttgccgcctctccaacctgcggcggagtcgcgagctgaatgtctttcggcacaatctgacctgtcagcgcgtttaacgactcggcgccaaccgcattcagcatctcttgttgctgtgcggcgtccggtccgatgtggcgttcaatgaaagcgccgcggttttcaagctggcttaacgtctgtgtcatgggcgatggttcctgaaacgtgcagtgaatcgtgattgtctctaactcaattgcccggtggcgctgacgcttaccgggcctacgcgtgcgaaaacgaatacgcaaaatcattcgcgttgcagtgagtaggccggataagcattagcgccatccggcacaacattattcgtcttctaacaatgcctcatacgcggtggcatccagcagcgattcaagttcgctttcatcgctggctttgattttaaagatccagccaccggtatacggttcgctgttcaccagctccggggagtcgctcagcgcatcgtttaccgccacgatctcgccgcttaccggcgcataaatgtcggacgccgcttttacggactccgccacggcgcagtcgtcgcccgcgcttacggtcgcgccgacttccggcagatcaacaaaaaccatatcgcccaacagctcctgagcgtgttcagtaatgccaacggtgtaagtgccatccgcttctttacgcagccattcgtgttctttgctgtatttcagttctgcgggtacgttgctcatcaattaatctccaaaaaaggatgaatcacgcgacggctttgccgttacgcacaaaaacaggtttagtcacttttaccggcatttcacggttacgaatttgtacaatcgccgtctcgccgatgcccgccggaacgcgcgccagcgcaatgctgtagcccaacgttggggaaaacgtcccgctggtgataatgccttcttgctgattgccctgcgcatcggtaaaacgcaccggcaattcattacgcaatacgcccttctcggtcatcaccagaccgacaagctgctcatggcctttttcacgctgcatctccagcgcctcacggccaataaagtcgcggtcagcaggttcccaggcgatagtccatcccatattagccgccagcggagagataccttcatccatctcctgaccgtacaggttcatgcctgcttccagacgcagcgtgtcgcgcgcgccaagaccgcacggcttcacgcccgcctccaccagcgcacgccagaaatccgccgctttttcattcggcatggcgatttcatagcctgcttcgccggtataaccggtggtggcgataaacaaatcgcccgcctgaacgccgaagaacggcttcataccttctactgcatggcgctgttggtcagtaaacagagtcgccgctttttcctgcgcattcggcccctgtaccgcaatcagcgacaggtcgtcacgaacggtgatgtcgatggcataaggttcagcgtgttgggtaatccaggagaggtctttttcgcgggtggcggagttaacaacgagacggaagaaatcttcagtgaagtagtagacgataaggtcatcaatcacgccgcccgatgcgttaagcataccggagtagagggctttacccgtcttcgttagcttcgcgacgtcgtttgccagcagataacgtagaaactctcgtgtgcggctgccatgaagatcgacaatggtcatatgcgatacatcaaacatcccggcatcggtgcgcacagcgtggtgttcatcaagctgagagccgtaatgcaggggcatcatccagccatgaaaatcgaccatgcgggcgccgcatagcgtgtgttgttcgtacaaaggcgtctgttgggccatcttttcctcgttgaattagcgggggctaacaaccattttcatgggaaatcttcgccacgaaacctggcatcgacgccctttttcctgcgccgacgcaaacgttctcttgctcctgaacttaccaccgaaccaggcgctaaaccataaggctgaatttaccatcacattagcttatgactaaaaaacgccaaaaccccatcagcacaaaaaaccactattacgctaaataacctccataaaaatgaagctgatacgatttatcacaacataaattaatattaaatgtggaaaaaatgtcgaaaatctcgttcgcaaaaaatagtggcattagaaaatataatgcgaaataagcggtgaaattagattatttcaaacgaggaaagccccccggcgcgatagccgggaaagcaaagtgtgacgggtttcaaactcttgctggcgtgcagtcagacgcttaacgaagccattgcggaaggtcgtttagccccattgcctggcgaagcagttggggtttgacgccggggagcgtgtccgccagtttcagtccgatgtcgcgcagcaatttttttgccgggttttcgccggcaaacaggtcacgaaaaccttgcatcccggcaagcatcatcgccgcactatgtttacggctacgctcataacgacggagataaagatgttggccaatgtctttgccctggcgctgaagccggcgcagatcgtccaccagttcggccgcgtccataaagccgaggttgacgccttgccctgccagcggatggatggtgtgcgcggcatcaccgaccaacgccagacgatgcgcggcaaactggcgagcatagcggcccgtcagcggaaaaacctgccgttcgctttccaggcggcataagcccagccgattatcgaaggcgatagtcaacgcctggttaaacgcctcgtcgccgctctgttgcatacgctccgcatcctgcggagaaagcgaccagacaatggaacacagatgcggatcgcttaacggcaaaaacgccagaataccttcaccatgaaacacctggcgagcaaccgcgccgtgcggctcttcggtgcggatagtcgctaccagcgcatggtgacggtagtcccagaaagttaagggaatatccgctttgttacgcagccaggagttggcgccatccgcggcaatcaccagacgcgcggttaacatcgcgccgtcttttaaagtcaggaaggcgtcgttctctccccaggcaacctgctgtaactccgctggcgccattaaggtgatatccgccgcttgctgcgctttttgccacaatgcgtagtgaatgacgctgttttcaacaatatgccccagatggctatatcccatgcttgcgtcatcaaacgtaatacggccaaagctgtctttatcccagacttccataccgtggtagcaacttgcccgtcgcgccacaatgtttgaccatacgccaagacgggtaagcagtttttcgctggcggcattaatcgccgacacccgaagctgaggcggcgcatcgttcgccaacggctgggggacaacgtgatccagtaccgcaacgcgcaaaccgctcccctgcaagccgcaggcgacagccagtcccaccatgcctccgccaactattgctacatcaacactttgcactatttactcctggaaaccggaacaatcaaaaccgtaggccggataaggcgaagccgccatccggtatttttacgaacacgatgccggatggcggcgtgaacgccttatccggcctacagatcggcttaacgcgcaacccaacctaaggtccgctgtgccagcgcatcgcgcgcaggtggtaataattccatcgccattaaaccgatattgcgcccaataaccagcggcgcccaacgatttgcaaacagatggaccagaccgttcgttacgccaatcgtcgtatcccggtcaacctgacgacgctgctgatagcgcgataacacgtgccaggcgccaatatcctcgcccgcgtcctgtgccgcgaccagcgtttccgccaggctcatgacatcgcgcagaccgagattaaacccttgtccggcgataggatgcaacgtctgcgccgcattgccgaccacgacagtccggtgagaaaacactttcgccgccgtagtcagggcaagcggatacgcgctgcgcttaccggcctgagtaattcgccccagccgccagccgaacgcggcctgcaatgcatggcagaactgcgcgtcggaccagctcagcacctcatcgcgctggtcgagcgggtgacaccaaaccagcgaacatcggccatgcgacatcggcaacatcgccagcgggccattgggggtaaaacgttcaaaggcgcgtccctggtgcgggatagcggttgcgacattcgctatcaccgctaactgttcgtaaggctcctgatgccagtcaacgccgcaggctgacgcgagcgcggagtgggtaccgttagccgccaccagcacgctgccagctatcacattgccgttttccagagtgacgttaacctgctgttgggtacgcgacacgctggctacgcgctccgggcagtgcagcgtaacgcctggcgctttacgcaagagcgcaaacagacgcagcccgatatcatgcagctccgcaacgtgccccaacgctgccagactgtagtcctgcgcgtcgagagtcacaaatccggcatggccgcgatcgctgacgtgtacggtgttgattgccgttgcgcaatcggaaatcgcctgccagacgccaattcgcgccagttgctgacaagtgcccgccgccagcgcaatcgctctggcgtcaaagccgggatgaccgtcggcttcaggcgctttcgcttcaatcaggtgtaccggcaacgtcccatgactgaactgagagatggccagcgccagcgtcgcgcctgccatgccgccgccaacgataatgacgctcattgctgccgcgccgccgccattaatgcctcaatgtcatccgccttcttcacaacgccagcggtcaggttttcattaccggtttcggtaatgacaatgtcatcttcaattcgaacgccaatgccgcgatacgcttccggcacgtcggcatccggcgcgatatagaggcctggctctacggtcagcaccatgcccggctccaggatgcgggagcgatccggcccataaacgccgacatcatgaacatccagccccagccagtggctcaagccatgcataaagaaaggacgatgcgcattttcggcaatcagttgatcaacctctccttgcaaaatccccagcttcaccagcccggttatcatgatgcgcacgacttcgccggtcacctcctgaatagaggtaccaggacggaacagtcgcaggctggtctccagcgattccagaacgatgtcataaatttcacgctgggctagcgtaaatttcccgttcaccgggaaagtacgcgtgatatcgcccgcgtaacctttatattcacaacctgcgtcgataagcactaaatcgccgtcgcgcatttcactttcgttttcagtgtaatgcaggatacagccattttcgccgctgccgacaatggtgttataggagggatagcgcgcgccgtggcgattaaattcgtggtgaatttctccttccagctgatactcaaacatccccggacggcatttttccatcgcgcggatatgcgccagcgcgctaatttccccggcgcggcgcaggacagcaatctcttccggcgatttgaacaggcgcatctcatggacgatcggtcgccagtcagtcatggtggccggcgcggtcagattctggcgggagcctttacgcagcttctccagcgcagccagaacaatctcgtcggcatacgcatattcgccctgcgcgtggtacaccacatccagaccattaagcaactgaaagagttgctggttgatttcgctaaacgccagcgcccggtcaacgcccagtttttccggcgcggcatcctgtcctaaacggcgaccaaaccagatttccgccgtcaggtcgcgaacgcggttgaacaaaacgctgtggttgtgggtgtcatcactcttaatcagtaccagcacggcttccggttcgttaaaaccggtgaaataccagaagtcgctactctggcgatacggatattcactgtctgcgctgcgcgtcgcctccggcgcggcaaagatcagcgcggcgctgccgggctgcatttgcgccagtaatgcctggcgacggcgttggtattcctgctgagtcatgacatggcctccatttcgttttttcttagtgtagcgtcggtttacgcacttccggcgcggtcggctgttggcgcgtgaaagtgtcatgacataacagcgccgcaacacggacatattcgatgatctcttcgagcgacatctccagctcttcctgatcttcgctctcatcataaccaagctgcgcaatattacgcaggtcgtcaatcgcttcacccgtttcgccggtgactttatcaagtttaggctgcgttacgccgaggccaagcaaaaagtggttaacccacccggctaaggcatctgcgcgatcgaatacgctgacatcgtcgccttcaggcagataaagctgaaaaagaaagccgtcgtcttccagcgcgtcgctggtcgccgcgtgcattttgcgcagcgcctgagcaagctcatgcccgaaggccagaccttcgttcgtcaggtcgtgcaacagcggctgccatgagctgtcgttgttgccgccgcaaatcatcccgctgattaaaccatgcatttcagccggggtcagaccggccccttgttgattcaaaaaccggttcatttcgttgtaaccaggcatttcgttctgtatagacataagcattcgtcatcaaagggaggatattcatgatatgctaccactttggaccctggtgaaccagaaaagggcttgtatcttcacaccagggtagctatagtgtcgccccttcgcggaccctgggtctggagacgaaggcagcgcagtcaatcagcaggaaggtggcatgtctgcacaacccgtcgatatccaaatatttggccgttcactgcgagtgaattgcccgcctgaccaaagggatgcgttgaatcaggctgcggacgatctgaatcagcggttgcaagatctgaaagttcgcactagagtcacaaatactgagcagttggttttcattgccgcattgaatatcagctatgagttaactcaggaaaaagcgaagacccgcgattacgcggcgagcatggaacaacgtattcggatgctacaacagaccatcgaacaggcgttgcttgatcaaggtcgcataaccgaaaaaacgggccaaaactttgaataacacttttcgctttactatggtaaagtgattgtgaaaacagaatttctctgagatgtttgcaagcgggccagtcccctgagccgatatttcataccacaagaatgtggcgctccgcggttggtgagcatgctcggttcgtccgagaagccttaaaactgtgacgacacattcaccttgaaccaagggttcaagggttacagcctgcggcggcatctcggagattccccttctgactggcgacagccatgacgcaacttcccgaactctctttatcacgacaagaaatccgccggatgattcggcaacgtcgccgtgcgctaacgccagagcagcaacgccgttttggtcaacaggccgccgcccgaatgctcagctttcctcccgtcgtgatggcgcacactgtcgccgtgtttctctcctttgatggcgaactcgacacccagccgctgattgaacagctatggcgagcgggcaagcgcgtctaccttccggttcttcatcccttcagccctggcaacctcctgttcctgcactattatccgcagagtgtgctggtgaccaaccgcttaaagattcaggagccacggcttgatgtccgcgacgtattgccgctggcaaagctggatgtgctggtaacgccgttagtcgcgtttgacgaagacgggcagcgcctggggatgggcggcggattttatgaccgtacgttgcaaaactggcagcagcataagatcctacctgtgggctacgcgcatgattgccagttagtggaaaagttgccggttaaagagtgggatatcccgctgcctgcggtggtgacgccgtccaaaatttgggagtggtagccgtgttttgtcgattgacagcgtcgcttttttgacctaaatttctcggtgaagggtgagggaggcgaacctccctcctgcgtactcactgttaatatgctgggcaagcgatgattaacaggatcagcagcatgatgacgtatctcatcatcgtccctttcctttttagagcccctgcctcggtaggggctttcccgtttcagcgctatgctgagcccttatcgtaaattccttttattgctgtacaacacgcaacgctgcctttaattaccaattgcggcaaggctcgaaaacagaatgtatgcgttacacgaagagatgttgaggcagggaaaccagagaaaggatgggcaggtcatctcctgcccatttagcggaaattagtacagcagacgggcgcgaatggtgcccggaatcgccttcatcgccagcagcgctttctccgccacatcgccatcggcttctatatcaattaccacataccccattcgggcggaggtttgcagatactgtgcggcaatgttaacgccctgctcggcaaagatctggttaagcgcggtcaatacgcccgggcggttttcgtggatgtgcatcaggcgacgaccaccgtgcagcggcagcgacacttccgggaagttcacggcggacagcgtcgagccgttatccgagtacttaatcagttttcctgcgacttccagaccgatgttttcttgcgcctcctgcgtcgagccgccgatatgcggcgtcaggatcacgttatcgaattcgcacagcggagaggtaaacggatcgctattagtggccggttccgtcgggaagacgtcgatagccgcccccgccagatgtttcgtcgccagcgcgtcgcacaaagccgggatatctaccaccgtaccgcgcgcggcgttaatcagcagcgaacccggcttcatcagggcaatctcttttgcgcccatcatgtttttggtggaggcgttttcaggtacgtgcagactgaccacatcgctcatattcagcaattcagacagatgctgcacctgagttgcattaccgagcggcagtttattttcaatatcatagaaatagacatgcatccccagcgattccgccagaatgcccaactgcgttccgatatggccgtaaccgataatgccaagctttttaccgcgcgcttcgaacgatcccgccgccagtttattccatacgccgcggtgcgctttggcgttcgcttccggcacgccgcgcagcagcagcaatagctcgccaatcaccagctccgccacggaacgggtattcgagaatggcgcgttaaagaccggaataccgcgttttgccgccgcatttaaatccacctggttggtgccgatgcaaaaacagccaatcgccaccagcttctctgcggcgttaatcacttcttctgtcagatgagtacgggatcgcagaccgatgaagtgggcatcgcggatggacgctttcaactgttcagcgtccagcgcgcccttgtgatattcaatgttggtgtaacctgccgcacgaaggctttccagcgccttttgatgcaccccttcaaccagcagaaatttaattttatctttctccagcgatacctttgccatttccccgatcctgtcttttttgccatctgatgttgtgtgtggatttgcatccgtccttcaacatatcaaaaaaaattatcacggcaatatgaacgtttgcgccagcgtcgtgaaggaatcgcatacagcgggaaatagcagatgaaaataccgggaataactttttctttggagggatcggcagggcaaacgattaaacgtgatacatgtcaccaaatttgccctgaccgaattttttacgcggcaggaaatacgcctggcgggatcattttacgatggttttcaccccgtccggcgtgccgatcagtgcgacatcggcgccacggttggcgaacaaccctacggtcacgacgcccggaatcgcgttaatggcgttttccagcgcgatgggatcaaggatttccataccataaacatccagaatcacgttgccgttatccgtgaccacgttctgacggtactccggacgcccgcccagcttcaccagttgacgagcgaccgcgctgcgcgccatcggaatcacttcgaccggcaacgggaatttgccaagaatatccacctgtttagaggcatccgcaatacagataaatttctctgccacggaagcaataattttctcacgggttaatgccgcgccgccgcctttgatcatctgcatatgaccgttgatttcgtccgcgccgtcgacatagatgcccaggctatccacttcgttgagatcaaacacatgaataccgaggcctttgagtttttcagtcgaggcgtccgagctggagaccgcgccttcaatctggcctttcattgtgcccagcgcatcaataaagtgtgcggccgttgagcctgtaccaacgcccacaatggtgccgggctgtacatactgaagtgccgcccatcctaccgcttttttcagttcatcctgcgtcatagatcgtttcgcctgtggtgtgaaaatacagccgcattatagaacattgtcgggaaaaatctccgtgtccgtacacaggctacggatttcatctgtaccgacggcaaatttatgtcatagtgcggaaaaaaataacaggagcatgacacaacaatgaaacgtccggactacagaacactacaggcgctggatgccgttatacgtgaacgaggattcgagcgcgccgcccagaagctgtgcatcacgcaatccgccgtctcacagcgcataaaacagcttgagaatatgttcggacaacctttgttggtgcgtaccgttcctcctcgccccacggagcaagggcaaaaattactggctctgctgcgtcaggttgaactgctggaagaagagtggctgggcgatgaacaaaccggctctacgccgctgctgctgtcgctggcggttaacgccgacagtctggcgacctggctgcttccggcgctggcgccggtactggcggactcccctatccgtctcaatttacaggtggaagatgaaacgcgcacgcaagaacgtctgcggcgcggcgaggtggtgggcgcggtgagtattcagcatcaggcgctacccagttgcctggtggacaaactgggcgcactcgactatctgtttgtcgcgtcaaagccgtttgccgagcgctatttccccaatggcgttacccggtcgtcgctgctaaaagcgcccgccgtcgcgttcgaccatctggatgatatgcatcaggcctttttgcaacagaatttcgatctaccgcccggcagcgtgccgtgccatatcgttaattcatccgaagcatttgtacagcttgcgcgtcagggcacgacctgctgcatgatccctcacctgcagattgagaaagagctggaaagcggcgagttgatcaacttaacgcctggtttgctgcagcgccggatgctttactggcaccgctttgccccggaaagccggatgatgcgcaaagtgaccgacgcgctgctggagtacgggcacaaggtgctgcgtcaggattagcctctctatgaatgccggatggcggcgtgaacgtcttatccggcctgcatgacccattattccctcgtcacttctttgaagttcatcacaaaatcattgcgttcaggcggcaaaaaacgacgcgccattggctattttttgctggcgacaaggcgattcaaaacgctcaccgtattagcaaatcttcatttcaatgcgtaatacggagcaaaaaacgagaacaccgggagaaaacgcggcctggaagcgcccaggccgggtgagattactgcgtgctggcggccgttgtcgacgtctgccctgttccaggttcaagctggaataccacatcgacctgatcgtcgaactgaatggtcggctgctcgtaagtttcctgcgcagataccggcgcagcatctgcggctttcatcattcgcaccaccggactcggctgataattagagacatggtaacgaacgctgtaaaccggccccaatttgctgttaaaaccggctgccagcgcttgcgcctgatgaatcgcgtcatcaatggcggctttgcgggccttgtctttataggcgtccggttgcgccacgcccagcgataccgaacgaatctcgttcagacccgccttcagcgcgccgtccagcagagaattaagtttatctaactgacgcagcgtcacctcaacggttcgcaccgcacgataccctttcagaatgcttttaccgttttggtaatcataatccggctgcgtgcgcagattcgccgcgctaatgtcttttttcgcaatctgattttgctcaaggaaggaaagatattgcgccacgcgctcatcggcctgcttcttcgccgtcgccgcgtccttcgccgcgacgttcacttcaatcgctaaggtggcgatatcaggcacagcatcgacgcttgccgtaccggaagtcacgatgtgcgggccttccggcaattcgcttgcctgcgccgacattgcacttaaacccactaatgccgccagggccatcactttgaacttcacagtctctcctccatattgcagtcattgccctgatatacagggcgcatgcaggcaagcttagcggatatcggcctgttgtccatcagacaacgcttagttgaaaagcgcgtgcatatgcgcgacgccttcccgcgccagttggaaggcgataagccacatcaccaccccaaccagaatgttgataatgcgttgagctttcgccgtacgcagtcgaggcgcaagccaggccgccagtagcgctaacccaaaaaaccataagaacgacgcgctaatcgtgccgagggcgaaccagcgctttggctccatagccagttgtccgccgagactgcccaacacgacaaacgtatccagataaacgtgcggattcagccacgttaccgccagcatcgtagcaataattttccagcgcccctgcttcataacctcggcgctggccagctccagattactgctcattgccgttttcagcgcgccaaaaccgtaccataacaagaacgcgaccccgccccatgtgaccagcgccagcagccacggcgactgcatcagcaacgcgctaccgccaaaaataccggcgctaatcaggactaaatcacttaacgcgcaaagcagcgctatcatgaggtggtactggcgacgaattccctgattcatcacaaacgcattttgcgggccaagcggaaggatcatggcggcgccaagggcaaacccttgaaaataataagatatcacgttaactaccctgagctgtttttcttaaaggcagactatagcgcgggaatattattagcggaaattgataattttaatcactaataagaaaagctaataaagagactgaataacggatagcggctacgcttatccgctcaataaccagagaatactggaggcggataagcgcagcgccggcaggcagcgcgggagaaaattactccgcggcgttatctttcacgcgtttaaaattgacgtccatctgcgggtacgggaagctaataccagcggcgtcgaattcacgtttaatacgttccagcacgtcccagtagacattttgcaggtcgctgcttttactccagacacgcaccacaaaattaattgatgaggcgcccagctcattcaaacgcaccgtcatttcgcgatcttttaaaatacgatcgtcggactcgataatcgtcgttagcagctgtttcacctgatcgatatccgaatcgtaggccaccccaataatgaattcgttacggcgaaccggctcacgagaatagttgatgatatttcccgcgataattttgccattcggaatcacaataattttgccgtctaccgcgcgcattgtcgtggaaaagatttgcacgttcagtaccgtaccggcaacgccgcccaaatcgacatactcaccggcgcggaacggacggaacataaccagcaataccccagccgcaaggttagaaagcgatccctgtaatgccaggccaacggctaaaccagcggcgcccagtacggcaataaccgaggcggtttgaacccccacgcgacccagagccgcaatcagcgtaaaagcgataaccccatagcgcaccagcgcagaaagaaagtcggccactgtcgcatcaatatgacgcgcacgcatcagacgatttaccgtattggagatcacgcgcgctacaatcaagccgatgatgataatagcgatagccgcaacaatattcacagcatagctgagcaataacgcctggttgcgtaccagccaggtgcccgcaccatttatgctgtcgacaacattcaaatcttccattcaatattccttggtcatagcaaaacaagcaaatgagatcattctcacgaaaagaactttttaaaggtaaacaaaaacagaagaatatgccatttttcggcatcatcccaaaaaaggcaggtacattgtgagttggccggatgaaagcgctaactaacgccgctctccggaaataacgataaaaaaatggcttcccaagggaagccatttcaatcagcagactatattacagaacgtcaatcgcgttcagttctttaaatgctttttccagacgagcgatcatcgaagtctggccagcacgcagccatacgcgcgggtcatagtatttcttgttcggctgatcttcgcctttcgggttgcccagctgaccttgcagatacgcttcgttttctttgtagtagttcagaacaccttcccaggttgcccattgggtatcggtatcgatgttcattttcactacgccgtagcttacggagtctttgatttcctgagcagtagaaccggaaccgccgtggaaaacgaagttcaggctgttgtgcggcaggttgtgtttcttagaaacatagtcctgagaatcacgcagaatggtcggggtcagaaccacgttacccggcttgtaaacgccgtgtacgttaccgaaggaagcggcaatggtgaaacgcgggctgattttgctcagttcagtgtacgcgtaatcaacgtcttccggctgggtgtacagagcagaagcgtccatgtggctgttgtccacgccgtcttcttcaccaccggtgcaacccagttcgatttccagagtcatgccaattttggacatgcgcgccaggtatttggagcagatttcgatgttttcgtgcagagactcttcagacaggtcaatcatgtgagaagagaacagcggtttaccggtagccgcaaagtgtttttcacccgcgtccagcaggccatcgatccacggcagcagtttcttcgcgcagtggtcagtgtgcaggataaccggaacgccgtagtgttcagccatctggtgaacgtgatgcgcgccagagatagcgcccaggattgccgcgccctgaggtacgtcagttttcacgcctttacccgcgatgaaggaagcgccgccgttggagaactgaacgatgaccggtgctttaacttttgcagcggtttccagaacagcgttgatggaatcagtgcccacgcagttaactgccggcagagcaaaattgttttcttttgctacctggaacactttctgtacgtcatcaccagtgatcacgcctggttttacgaaatcaaaaattttagacatgtttcgttgtcctgtatcgtcgggctttgggaaaaaacacgggccgccctgaatgtcagatcggcgataaatcaacgggcaggaatccctgcccgtaacgattacttcttagcgcgctcttcgagcatcgctacggctggcagaactttaccttccacgaattcgaggaatgcgccgccgccagtagaaatgtaggaaattttgtcagcaatgccgaacaggtcgattgccgccagggtgtcgccgccgccagcgatggaaaacgcttcgctatcagcgatggcattcgccacgatttcagtccctttacggaagttcgggaactcaaacacgccaaccgggccgttccacagaatggttttggcattcttgaggatttcagccagctgctgagcggaagca
